United States Patent Application Publication US 2019/0002960 A1 - sequence listing, part 2

SEQ ID NO: 2 - DNA, 2872915 bp, Staphylococcus aureus subsp. aureus USA300_TCH1516 (residues 1-1,436,458 of 2,872,915)
actactgctcaatttttttacttttatcgattaaagatagaaatacacgatgcgagcaatcaaatttcataacatcaccatgagtttggtccgaagcatgagtgtttacaatgttcgaacaccttatacagttcttatacatactttataaattatttcccaaactgttttgatacactcactaacagatactctatagaaggaaaagttatccacttatgcacatttatagttttcagaattgtggataattagaaattacacacaaagttatactatttttagcaacatattcacaggtatttgacatatagaggactgaaaaagtataattgtgtggataagtcgtccaactcatgattttataaggatttatttattgatttttacataaaaatactgtgcataactaataagcaagataaagttatccaccgattgttattaacttgtggataattattaacatggtgtgtttagaagttatccacggctgttatttttgtgtataacttaaaaatttaagaaagatggagtaaatttatgtcggaaaaagaaatttgggaaaaagtgcttgaaattgctcaagaaaaattatcagctgtaagttactcaactttcctaaaagatactgagctttacacgattaaagatggtgaagctatcgtattatcgagtattccttttaatgcaaattggttaaatcaacaatatgctgaaattatccaagcaatcttatttgatgttgtaggctatgaagttaaacctcactttattactactgaagaattagcaaattatagtaataatgaaactgctactccaaaagaaacaacaaaaccttctactgaaacaactgaggataatcatgtgcttggtagagagcaattcaatgcccataacacatttgacacttttgtaatcggacccggtaaccgctttccacatgcagcgagtttagctgtggccgaagcaccagccaaagcgtacaatccattatttatctatggaggtgttggtttaggaaaaacccatttaatgcatgccattggtcatcatgttttagataataatccagatgccaaagtgatttacacatcaagtgaaaaattcacaaatgaatttattaaatcaattcgtgataacgaaggtgaagctttcagagaaagatatcgtaatatcgacgtcttattaatcgatgatattcagttcatacaaaacaaggtacaaacacaagaagaatttttctatacttttaatgaattgcatcagaataacaagcaaatagttatttcgagtgatcgaccaccaaaggaaattgcacaattagaagaccgattacgttcacgctttgaatgggggctaattgttgatattacgccaccagattatgaaactcgaatggcaattttgcagaagaaaattgaagaagaaaaattagatattccaccagaagctttaaattatatagcaaatcaaattcaatctaatattcgtgaattagaaggtgcattaacacgtttacttgcatattcacaattattaggaaaaccaattacaactgaattaactgctgaagctttaaaagatatcattcaagcaccaaaatctaaaaagattaccatccaagatattcaaaaaattgtaggccagtactataatgttagaattgaagatttcagtgcaaaaaaacgtacaaagtcaattgcatatccgcgtcaaatagctatgtacttgtctagagagcttacagatttctcattacctaaaattggtgaagaatttggtgggcgtgatcatacgaccgtcattcatgctcatgaaaaaatatctaaagatttaaaagaagatcctatttttaaacaagaagtagagaatcttgaaaaagaaataagaaatgtataagtaggaaactttgggaaatgtaatctgttatataacagcactaatgataacaatcattttttacatttctatatgctaatgtggcaagatgagcaaaactcattttgtggataatgtttaaaagtcatacacaccatacacaagttatcaacatgtgtataacttcgccaaatctatgtttttaagacttatccaccaatccacagcacctactactattactaagaacttaaaacctatataattatatataaacgactggaaggagttttaattaatgatggaattcactattaaaagagattattttattacacaattaaatgacacattaaaagctatttcaccaagaacaacattacctatattaactggtatcaaaatcgatgcgaaagaacatgaagttatattaactggttcagactctgaaatttcaatagaaatcactattcctaaaactgtagatggcgaagatattgtcaatatttcagaaacaggctcagtagtacttcctggacgattctttgttgatattataaaaaaattacctggtaaagatgttaaattatctacaaatgaacaattccagacattaattacatcaggtcattctgaatttaatttaagtggcttagatccagatcaatatcctttattacctcaagtttctagagatgacgcaattcaattgtcggtaaaagtgcttaaaaacgtgattgcacaaacaaattttgcagtgtccacctcagaaacacgcccagtactaactggtgtgaactggcttatacaagaaaatgaattaatatgcacagcgactgactcacaccgcttggctgtaagaaagttgcagttagaagatgtttctgaaaacaaaaatgtcatcattccaggtaaggctttagctgaattaaataaaattatgtctgacaatgaagaagacattgatatcttctttgcttcaaaccaagttttatttaaagttggaaatgtgaactttatttctcgattattagaaggacattatcctgatacaacacgtttattccctgaaaactatgaaattaaattaagtatagacaatggggagttttatcatgcgattgatcgtgcctctttattagcgcgtgaaggtggtaataacgttattaaattaagtacaggtgatgacgttgttgaattgtcttctacatcaccagaaattggtactgtaaaagaagaagttgatgcaaacgatgttgaaggtggtagcctgaaaatttcattcaactctaaatatatgatggatgctttaaaagcaatcgataatgatgaggttgaagttgaattcttcggtacaatgaaaccatttattctaaaaccaaaaggtgacgactcggtaacgcaattaattttaccaatcagaacttactaaaaataaatataaataaaggatgacgtgattaattaaaacgtcatcctttattttttggcaaaaataattctaggtgcgtatgtaaaataaatttggcagcattttaaacagcaaataaaagacgccaattaaatttatgacaaatgtatccaaaatttaataagtgtgcttatatgccctttaaatttaaaattttaatagtcaataacaagttgaatataaaagttaaacgccgttaaatagcgttaaaaaattgaaaatgacagtattgccaaaaaataagaattaattatttatatgtaaacggtttctacctctattttaaatgaaatttgtgacaaaaaaaggtataatatattaatgacatacaaagaaatggagtgattattttggttcaagaagttgtagtagaaggagacattaatttaggtcaatttctaaaaacagaagggattattgaatctggtggtcaagcaaaatggttcttgcaagacgttgaagtattaattaatggagtgcgtgaaacacgtcgcggtaaaaagttagaacatcaagatcgtatagatatcccagaattacctgaagatgctggttctttcttaatcattcatcaaggtgaacaatgaagttaaatacactccaattagaaaattatcgtaactatgatgaggttacgttgaaatgtcatcctgacgtgaatatcctcattggagaaaatgcacaaggaaagacaaatttacttgaatcaatttataccttagctttagcaaaaagtcatagaacgagtaatgataaggaactcatacgttttaatgctgattatgctaaaatagaaggtgagcttagttatagacacggcacgatgccattaacaatgtttataactaaaaaaggtaaacaagtcaaagtgaatcacttagagcaaagtcgtctaactcaatatattggacacctcaatgtggttctatttgcgccagaagatttgaatattgtaaaaggctctcctcaaataagacgacgctttatagatatggagttgggccaaatttctgctgtttacttaaatgatttagctcaataccaacgtattttaaagcaaaagaataattacttaaagcagttacaattaggccaaaaaaaggacttaacaatgttggaagtattaaatcagcagtttgctgaatatgcaatgaaagtaactgataaacgtgcacattttattcaagagctagagtcgttagctaaaccgattcatgctggtatcacaaatgataaagaagcgttgtcgctgaattatttacctagtcttaaatttgattatgctcaaaatgaagcggcacgacttgaagaaattatgtctattcttagcgataatatgcaaagagaaaaagaacgaggcattagcttattcggaccacatcgagatgatataagttttgatgtgaatggcatggatgctcaaacatatggttctcaaggacagcaacgtacaacggctttgtccattaaattagctgaaattgagttaatgaatatcgaagttggggaatatcccatcttattattagacgatgtactcagtgaattagatgattcgcgtcaaacgcatttattaagtacgattcagcataaagtacaaacatttgtcactacgacatctgtagatggtattgatcatgaaatcatgaataacgctaaattgtatcgtattaatcaaggtgaaattataaagtaacagaaagcgatggtgactgcattgtcagatgtaaacaacacggataattatggtgctgggcaaatacaagtattagaaggtttagaagcagtacgtaaaagaccaggtatgtatataggatcgacttcagagagaggtttgcaccatttagtgtgggaaattgtcgataatagtatcgatgaagcattagctggttatgcaaatcaaattgaagttgttattgaaaaagataactggattaaagtaacggataacggacgtggtatcccagttgatattcaagaaaaaatgggacgtccagctgtcgaagttattttaactgttttacatgctggtggtaaatttggcggtggcggatacaaagtatctggtggtttacatggtgttggttcatcagttgtaaacgcattgtcacaagacttagaagtatatgtacacagaaatgagactatatatcatcaagcatataaaaaaggtgtacctcaatttgacttaaaagaagttggcacaactgataagacaggtactgtcattcgttttaaagcagatggagaaatcttcacagagacaactgtatacaactatgaaacattacagcagcgtattagagagcttgctttcttaaacaaaggaattcaaatcacattaagagatgaacgtgatgaagaaaacgttagagaagactcctatcactatgagggcggtattaaatcgtacgttgagttattgaacgaaaataaagaacctattcatgatgagccaatttatattcatcaatctaaagatgatattgaagtagaaattgcgattcaatataactcaggatatgccacaaatcttttaacttacgcaaataacattcatacgtatgaaggtggtacgcatgaagacggattcaaacgtgcattaacgcgtgtcttaaatagttatggtttaagtagcaagattatgaaagaagaaaaagatagactttctggtgaagatacacgtgaaggtatgacagcaattatatctatcaaacatggtgatcctcaattcgaaggtcaaacgaagacaaaattaggtaattctgaagtgcgtcaagttgtagataaattattctcagagcactttgaacgatttttatatgaaaatccacaagtcgcacgtacagtggttgaaaaaggtattatggcggcacgtgcacgtgttgctgcgaaaaaagcgcgtgaagtaacacgtcgtaaatcagcgttagatgtagcaagccttccaggtaaattagccgattgctctagtaaaagtcctgaagaatgtgagattttcttagtcgaaggggactctgccggggggtctacaaaatctggtcgtgactctagaacgcaggcgattttaccattacgaggtaagatattaaatgttgaaaaagcacgattagatagaattttgaataacaatgaaattcgtcaaatgatcacagcatttggtacaggaatcggtggcgactttgatctagcgaaagcaagatatcacaaaatcgtcattatgactgatgccgatgtggatggagcgcatattagaacattgttattaacattcttctatcgatttatgagaccgttaattgaagcaggctatgtgtatattgcacagccaccgttgtataaactgacacaaggtaaacaaaagtattatgtatacaatgatagggaacttgataaacttaaatctgaattgaatccaacaccaaaatggtctattgcacgatacaaaggtcttggagaaatgaatgcagatcaattatgggaaacaacaatgaaccctgagcaccgcgctcttttacaagtaaaacttgaagatgcgattgaagcggaccaaacatttgaaatgttaatgggtgacgttgtagaaaaccgtagacaatttatagaagataatgcagtttatgcaaacttagacttctaagcgctgtgaactgaacttttgaaggaggaactcttgatggctgaattacctcaatcaagaataaatgaacgaaatattaccagtgaaatgcgtgaatcatttttagattatgcgatgagtgttatcgttgctcgtgcattgccagatgttcgtgacggtttaaaaccagtacatcgtcgtatactatatggattaaatgaacaaggtatgacaccggataaatcatataaaaaatcagcacgtatcgttggtgacgtaatgggtaaatatcaccctcatggtgactcatctatttatgaagcaatggtacgtatggctcaagatttcagttatcgttatccgcttgttgatggccaaggtaactttggttcaatggatggagatggcgcagcagcaatgcgttatactgaagcgcgtatgactaaaatcacacttgaactgttacgtgatattaataaagatacaatagattttatcgataactatgatggtaatgaaagagagccgtcagtcttacctgctcgattccctaacttattagccaatggtgcatcaggtatcgcggtaggtatggcaacgaatattccaccacataacttaacagaattaatcaatggtgtacttagcttaagtaagaaccctgatatttcaattgctgagttaatggaggatattgaaggtcctgatttcccaactgctggacttattttaggtaagagtggtattagacgtgcatatgaaacaggtcgtggttcaattcaaatgcgttctcgtgcagttattgaagaacgtggaggcggacgtcaacgtattgttgtcactgaaattcctttccaagtgaataaggctcgtatgattgaaaaaattgcagagctcgttcgtgacaagaaaattgacggtatcactgatttacgtgatgaaacaagtttacgtactggtgtgcgtgtcgttattgatgtgcgtaaggatgcaaatgctagtgtcattttaaataacttatacaaacaaacacctcttcaaacatcatttggtgtgaatatgattgcacttgtaaatggtagaccgaagcttattaatttaaaagaagcgttggtacattatttagagcatcaaaagacagttgttagaagacgtacgcaatacaacttacgtaaagctaaagatcgtgcccacattttagaaggattacgtatcgcacttgaccatatcgatgaaattatttcaacgattcgtgagtcagatacagataaagttgcaatggaaagcttgcaacaacgcttcaaactttctgaaaaacaagctcaagctattttagacatgcgtttaagacgtctaacaggtttagagagagacaaaattgaagctgaatataatgagttattaaattatattagtgaattagaagcaatcttagctgatgaagaagtgttattacagttagttagagatgaattgactgaaattagagatcgtttcggtgatgatcgtcgtacagaaattcaattaggtggatttgaaaacttagaggacgaagacttaattccagaagaacaaatagtaattacactaagccataataactacattaaacgtttgccggtatctacatatcgtgctcaaaaccgtggtggtcgtggtgttcaaggtatgaatacattggaagaagattttgtcagtcaattggtaactttaagtacacatgaccatgtattgttctttactaacaaaggtcgtgtatacaaacttaaaggttacgaagtgcctgagttatcaagacagtctaaaggtattcctgtagtgaatgctattgaacttgaaaatgatgaagtcattagtacaatgattgctgttaaagaccttgaaagtgaagacaacttcttagtgtttgcaactaaacgtggtgtcgttaaacgttcagcattaagtaacttctcaagaataaatagaaatggtaagattgcgatttcgttcagagaagatgatgagttaattgcagttcgcttaacaagtggtcaagaagatatcttgattggtacatcacatgcatcattaattcgattccctgaatcaacattacgtcctttaggccgtacagcaacgggtgtgaaaggtattacacttcgtgaaggtgacgaagttgtagggcttgatgtagctcatgcaaacagtgttgatgaagtattagtagttactgaaaatggttatggtaaacgtacgccagttaatgactatcgcttatcaaatcgtggtggtaaaggtattaaaacagctacgattactgagcgtaatggtaatgttgtatgtatcactacagtaactggtgaagaagatttaatgattgttactaatgcaggtgtcattattcgactagatgttgcagatatttctcaaaatggtcgtgcagcacaaggtgttcgcttaattcgcttaggtgatgatcaatttgtttcaacggttgctaaagtaaaagaagatgcagaagatgaaacgaatgaagatgagcaatctacttcaactgtatctgaagatggtactgaacaacaacgtgaagcggttgtaaatgatgaaacaccaggaaatgcaattcatactgaagtgattgattcagaagaaaatgatgaagatggacgtattgaagtaagacaagatttcatggatcgtgttgaagaagatatacaacaatcatcagatgaagaataataaaaaataagacttccctatatgtaggggagtcttatttttatgctagaaagtaatgctttactatattcaatgattagtaatgactaactttctaattgtttcattgcgtaaggtatttcattgataagtcttgatggtggcaccacatacatatcttttgcaaggttttcgccaataaaactatgtgtatatgtggcactcataaccgcttcttttaagttatcaaattgaccgacaaagcttgtaatcataccagcaagtgtatcgcccataccaccagtcgccattgctgggctaccgattgtcaatttaaagtcttcatctttaaagaaaatttcagtaccatgttttttaagtacaacagttgcacctaaacgatcaactgcttcacgattacgctcatatgtctgttcctcaataggaataccacttaatcgttcccattctttgaggtgtggtgtaaagatcacacgacatgtaggtaattgcggtttcagtttactaaagattgtaatcgcatcgccgtctacgattaaattttgatgcggttgtatattttgtagtaggaatgtaatggcattatttcctttgaaatcaacgccaagacctggaccaattagtatactgtcagtcatttcaatcattttcgtcaacattttcgtatcattaatatcaataaccatcgcttctgggcaacgagaatgtaatgctgaatgatttgttggatgtgtagctacagtgattaaaccactaccgctaaatacacatgcacgagccgctaacataatggcaccacctaagttagcagatccaccaattaataaaattttgccataatcacctttatgtgaatcttctttacgcttaggaatgttaatagaatttaacgtttccatagtgatataacctcccatgtaaaagccttttccgaatttattcaattttaaaaatatatagtaacttttaacaaaatgtattataaatttctgaattcattattatttgtcgttaaatacaatagaaaatactatacctgtatatgcaattcgtcaatagataaattattaaatatgcttacaacaatcttaatatcctttaacgcactacaatagtgctctgataataggttataaatgtacgtaaaaccattgtttcaataaaaatgaaaacgtatacttcaagaaggatgggttacttaatataaacaagggggtaacatatatgactttatatttagatggtgaaacactaacaattgaggatattaaatcatttttacaacaacaatcaaagattgaaattattgatgatgcgttagaacgtgtcaaaaaaagtagagcggtagttgaacgtattattgaaaatgaggaaacggtttacggtattactacaggttttgggttatttagtgatgtacgtatagacccgacgcaatataatgaattacaagtgaatctgatacgctcacatgcctgtggactaggtgagccattttcaaaagaagtagcattagtcatgatgattttacgattgaatacattattaaaaggtcattcaggtgccactttagaattagtgagacaattacaattttttataaatgaacgtattataccgataatcccacagcaaggctctctcggtgcatcaggagatttagcgccattatcacatttagcattagcattaattggtgaagggaaagtattgtacagaggggaagaaaaggatagtgacgatgtattaagagaattaaatagacaacctttgaaccttcaggctaaagaaggtttagcattgattaatggtacgcaagctatgacagctcaaggtgtcattagttatatagaagcagaagatttaggttaccaatctgaatggattgctgcattaacgcatcagtctcttaatggcattatagatgcatatcgacatgatgtgcacgcagttcgtaattttcaagaacagattaatgtggcagcgcgtatgcgtgattggttagaaggatcaacattaacgacgcgacaatcagaaatacgtgtacaagatgcatatacgttgcgttgtataccacaaatccatggcgcgagttttcaagtattcaattatgttaaacagcaattagaatttgaaatgaatgcggctaatgataatccacttatatttgaggaagcaaatgaaacgtttgttatttcaggtggtaacttccatggacaacctattgcttttgcattagatcatcttaaattaggtgtaagtgaattagcaaacgtatcggaacgtcgtctagagcgactagtaaatcctcaattaaatggtgatttaccagcatttcttagtccagagccaggattgcaaagtggcgcgatgattatgcaatatgctgctgcaagtctcgtttctgaaaataaaactttagcgcatccagcgagtgttgattctatcacttcatctgcgaaccaagaagatcacgtatctatgggaactacagctgctagacatggttatcaaattattgaaaatgcaagacgtgtgctggcaatcgaatgtgttattgcattacaagcagcagagttaaaaggtgttgaaggattatcaccaaaaacacgtcgcaagtatgatgagtttcgaagtatcgtgccatccattacacatgatcgtcaatttcataaagatattgaagcggttgcacagtatttaaagcaatcaatttatcaaacgactgcatgtcactaaatcgacatgagtgatgtttgaaatcgttacttgaaaaagcaaatatagtttgctatattaaaaataacttaataagacattgttcgtaggacaagtaatatatagtgttcgatatcagagagcttgtggttagtgtgaacaagaatcaacatatatatgaatctacctacttaatttaaaagaacaatcggtgataaccgttattttagtgaagtgcaatttaggtttagtgtatctttataacttaaattgttaaatagggtggcaacgcgtagaccacgtcccttgtagggatgtggtctttttttattttctaaaaaataaagacgtacgtcattccataataaatgataattatttgggaaaggatgaaggttaatgttagacattagattattcagaaatgagcctgacacagttaagagcaaaattgaattacgtggagatgatccaaaagttgtagatgaaattttagaattggatgagcaacgacgtaaattaattagtgcaacagaagaaatgaaagcacgtcgtaataaagtaagcgaagaaatcgcattaaaaaaacgtaataaagaaaatgctgatgatgtgattgctgaaatgcgcacattaggtgacgatattaaagaaaaagatagtcaattaaatgaaattgataataaaatgacaggtatcctttgtcgtattccaaatttaataagtgatgatgtacctcaaggtgaatctgatgaagataacgttgaagttaaaaagtggggtacaccacgtgagttttcatttgaacccaaagcacattgggatattgtagaagaattgaaaatggctgattttgatcgtgcagcaaaagtttcaggtgcgcgttttgtatatttaacaaatgaaggtgcgcaattagagcgtgctttaatgaactatatgattacaaaacatacaacacaacatggttatacagaaatgatggtaccacagcttgtgaacgcagatacaatgtatggtacaggtcaattacctaaatttgaagaagatttatttaaagtagaaaaagaaggattatatacaattccaactgctgaagtaccattaacgaatttctaccgtaatgaaattattcaaccaggtgtacttcctgaaaaattcactggtcaatctgcatgtttccgtagtgaagcaggatcagcaggtagagatacaagaggattaattcgtttacatcaattcgataaagtggaaatggtacgttttgaacaacctgaagattcatggaatgctttagaagaaatgacaacaaacgcagaagcaattctagaagagttaggtttaccataccgtcgtgttattttatgtacaggtgatattggatttagtgcaagcaaaacatatgatttagaagtttggttaccaagctacaatgattataaagaaattagttcatgctcaaactgtacggatttccaagcgcgtcgtgctaacatccgcttcaagcgtgacaaagcagctaaaccagaattagcacatacattaaatggtagtggtttagcagttggacgtacatttgctgctattgttgaaaattaccaaaatgaagatggaacagtaacaattccagaagcattagtaccatttatgggtggtaaaacacaaatttcaaaaccagttaaataaaggctttagctacaagctttaaaaagtatatatctacgtatacttaaagcaagggcaagatactttaaataatattttaaaaagtggtgacgaagctgtcgccactttttttgtgctgtaaaagtataatagtgagccaatgcacataacaacaataaattaagtttgtggtttaatggggtgaacgcatttcattatagcaacaatacgggataattatgatgaactaaaacaatctaaaacgtaacaagtttgagcatcaccaatataggaaaggaagcgataaaatactgatttcgttgatatgtagtatgagttatatcgatggagtagggtagggggaggggatgattataagggagtggtacatgaatcaatatcccagactcatcatcagatataaaaatttataaaattgatacttaaaaacaactacaaatccatagaaaatatggaggtagtcttaaataaaaaattgaaaattctcaaaaataaaaagttaatatgaagctgactaaagactccggtatgtctaacctcagacaaactgatgtctaatgttattgcttagggtatagaactgtattagactaggtatattattttttcgtaattatataaatataaagtggcaaaggaggtaattgagatgacaacacatttaagttttagacaaggcgtgcaagagtgtatcccaacattattgggttatgccggtgttggtatttcatttggtattgtggcttcgtctcaaaactttagtattttagaaattgtcttgttatgtcttgttatatatgccggtgctgcgcaatttattatgtgcgcgttgtttatagcaggtacacctatatcagcgattgtactaactgtatttatcgtaaattcaagaatgttccttttaagtatgtcgcttgcaccaaacttcaagacatatgggttttggaaccgtgttggattaggttcattagtaactgacgaaacgtttggcgtcgccattacaccttatttaaaaggagaagctatcaatgatcgttggatgcatggtcttaacatcacagcatatttattttgggcaatttcatgtgtagctggggctttatttggcgaatatatctcaaatccgcaaacgctagggttagattttgctatcacggctatgtttatctttttggccattgcgcaatttgaatcaattactaaatcgcgattaagaatttacatagtactcattattgccgtcatagtaatgatgttatcgctaagtatgtttatgccttcatatctagcaatattaattgcagccacaatttcagcagcgttaggagtgatgatggaacaatgataactcatatgaacatgttaatacttattttattgtgtggtatcgtaacgctattaattcgaattataccttttatcatgatttcaaaagtgcaattgcctgatgtcgtggttcgatggctatcatttatcccaatcacactatttacggcacttgtcattgacagcattattcaacagacgcctcatggtgaggggtatacattaaacatcccttacattatcgcgctcattccgacggttattttatctataatcacgcgtagtttaactattacaattattagtgggattgttatcatggcagcattacgatttttcttttaaaaataactgaaaatcattgaacagatatttaaacttaggtaaactgttagtaatcagaaaattctgatatacaaatcgtctatgttaagattgggaatcgtgtatacgtaagcgatttggctaacgcatgacaatgataacaacattttaaatgataaaagtaattcatcactgaatctcaactaacacataacaatttcatatttcttattgtgagaagttgagggacttggccctgtgatacttcagcaaccgactttatagcacggtgctaaaaccaacgagttactcgaatgataagtataaagacttcttacttttcaatagggtgagaagtttttttgtttaaggaggaaagaacaatgacaaattacacagtagatactttaaatttaggggaatttattacagaatctggggaagtcatagataacttgcgtttgagatatgagcatgtcggttatcatggacaaccattagttgtagtttgtcatgcattaactggcaatcatttaacatatggaacagatgattatccgggttggtggcgagaaattattgatgggggatatatacccattcacgattatcaatttttaacatttgatgttattggtagtcctttcggttcaagttcacctttaaacgaccctcattttcctaaaaaattaacattaagagatatagtcagagcgaatgaacgaggtatacaagcccttggttatgataagattaatattttaatagggggaagtcttggaggtatgcaagcaatggaactactctacaatcaacagtttgaagtagataaagccattatccttgctgcaacaagtcgaacatcatcttatagtagagctttcaatgaaattgcaaggcaagccattcatcttggtggtaaggaaggtctaagtattgcacgccaattaggttttttgacatatcgatcatcaaaaagttatgatgaacgtttcacgccggatgaagtagtcgcataccaacaacatcaaggtaataaatttaaagaacattttgatttgaattgttatctgacactgctagatgtattggatagtcacaacattgaccgaggtcgcacagacgtaacgcatgtttttaaaaatttagaaacaaaagtgttaacgatggggttcatagatgatttgctatatccggatgatcaagttcgtgcattaggtgaacgttttaaatatcatcgtcatttcttcgtgcctgataatgttgggcatgatggattcctactaaactttagtacctgggcacctaacttatatcatttcttaaatttaaagcattttaagcgtaagtaataatatatattttcaaagaatgaagccactaaatcacagttatcatattcaaaaacatctagagtacatgagagtggaaatgtattgtaaatctaaatcaagcttgattgctatgtagtgggattaaataatcatgttgaaaatgaaagcacacaaaagcgattcaaatgagtatgttaattacttataaaacatgaaagttattattcaattaaatgaaatagaagcatacaatctataaattgttaattttcattaaagaggttaaaataatagctatagttaaaaatatgggagtggcttatgtgttttcaaaaatacaacctaaagcaacaataattgcaacgattgcgttggtatttgtcgctttagctttatatctagtgcctggtttaggactaatatttgcattatttgcaaccataccaggtatcgttttatggaataaatcaatacaatctttcgggattagtgcacttattacagtaattataacaactgttttaggtaatactttcgttttaagtgccatcatattagtcttaattgcaagtttaattattggtcaattgctcaaagaaagaacgtctaaagaaagaatattatacgtaacaacagtagcgatgagcttaatttcattaatcgcttttatgttactacaaacattcggaaggattccaccatcagcgagcatagtaaaacctttcaagcaaacattacatgaagcgattacgatgagcggtgccgatgcgaatatgacccaaatattagaagaagggtttagacaagcgaccgttcaattaccaggtttcatcattatcattacatttttaatcgtcttaattaacttaatcgttacatttccgattttacgaaaatttaaaatcgctacacctgtatttaagccacttttcgcgtggcaaatgagcggtattttattatggatatacattattgttatcatatgtttattatttacaggtcaaccgagtgtgttccagagcattcttttaaacttccaacttgtgttatcattagtaatgtatattcaaggtttaagtgttattcatttctttggtaaagcgaaaggtttgccgaatgcagtaacgattttactattggttatcggtacaatactgacacctacgacacatattgtaggactacttggtgttatcgatttaagtttgaatttgaagcgaatcatgaaaaataattctaaaaagtgaatagaggtggaataatgaatcggcagtccactaagaaagctttactaataccatttgtcatcatgatcatcacagcaattgttttaatgggtgtatggtttatctttaatagtcttatagcactaattgcatctatcgttcttgtcgtgatgattattgttagcatcattttattcagacaagctttaatgaaaatggatagttatgtagatggtttgagtgctcaaatttcaacaacaaataataaagcaatcaaacatttaccaattggtatcattgttttagatgaaaatgatcacatcgaatgggttaaccaatttatgacagatcatatggaagcgaatgtcatttctgaatctgtaaatgaagtatttccaaacattttaaagcaattagatagagtgaaatccgttgaaatagaatataatcagtatcatttccaagtacgttattctgagaatgatcactgcctctatttctttgatataactgaacaagtacaaacaaatgaactatatgaaaattctaaaccaatcattgcgacattatttttagataactacgatgagattacgcaaaatatgaatgatacgcagcgttcggaaatcaactcaatggtaacgcgtgtcattagtcgatgggcaactgagtataatatatttttcaaaagatacagttccgatcaattcgtagcctatttaaatcaaaaaatattagctgacttagaagaatctaaatttgatatcttgagtcaattacgtgaaaaaagtgttggttatcgtgcccaattaacattaagtatcggtgttggtgaaggtactgaaaatttaatcgacttaggtgaattatcacaatcaggcctagacttagcattaggacgcggtggcgaccaagttgcaattaaaagtattaatggtaatgtgcgtttctatggcggtaagactgacccgatggagaaacgtactcgtgtaagagcacgtgtgatctcacatgcgttaaaagatatccttgcagagggtgacaaagtcattatcatgggacataaacgtcctgacttagatgcaattggtgcagcaatcggtgtgtctagatttgcaatgatgaataatttagaagcatacatcgtattaaatgagactgacattgatccaacattacgacgcgtgatgaacgaaatagataaaaagccagagttaagagagcgatttattacatcagatgatgcttgggatatgatgacatctaagacaaccgtagtgattgttgatacgcataaaccggaactggttttagatgaaaatgtcttaaataaagcaaaccgtaaagttgttatcgatcatcatagacgtggtgaaagcttcatctctaatccattgttgatatatatggaaccatacgcaagttcgacagctgaattggtaacagagttactggaatatcaaccaacagaacaacgtttaacacgtcttgaatcaacagtgatgtatgcaggtattattgtagatacaagaaactttacattacgaacaggatcaagaacattcgatgcagcgagttatttacgtgcacatggtgcagatacgattttaacgcaacatttcttaaaagatgatgtggatacttacattaatcgatctgaattaattcgaactgtaaaagttgaagataatggcatagccattgcgcatggttcagacgataaaatttatcatccagtaacagttgcacaagcagcagatgaactgttaagtttagaaggtattgaagcatcatatgttgttgcgagacgtgaagataatctgattggtatatctgcgcgttcactcggttcagtaaatgtccagttaacaatggaagcacttggtggcggtggacatttaaccaatgcggcaacacaacttaaaggtgtgacagtcgaagaggcgatagcacaattacaacaagcaattacagaacaattaagtaggagtgaagatgcatgaaagtaatttttacacaagatgttaaaggtaaaggtaaaaaaggtgaagttaaagaagtaccagtaggttatgcaaataacttcttattgaaaaagaattatgctgtagaagcaacaccaggtaaccttaaacaattagagttacagaaaaaacgtgcaaaacaagaacgccaacaagaaattgaagatgctaaagcattaaaagaaacgttatcaaacattgaagttgaagtatcagcaaaaactggtgaaggtggtaaattgtttgggtcagtaagtacaaaacaaattgccgaagcactaaaagcacaacatgatattaaaattgataaacgtaaaatggatttaccaaatggaattcattccctaggatatacgaatgtacctgttaaattagataaagaagttgaaggtacaattcgcgtacacacagttgaacaataaagttggattgaaataagaggtgtaaccattcatggatagaatgtatgagcaaaatcaaatgccgcataacaatgaagctgaacagtctgtcttaggttcaattattatagatccagaattgattaatactactcaggaagttttgcttcctgagtcgttttataggggtgcccatcaacatattttccgtgcaatgatgcacttaaatgaagataataaagaaattgatgttgtaacattgatggatcaattatcgacggaaggtacgttgaatgaagcgggtggcccgcaatatcttgcagagttatctacaaatgtaccaacgacgcgaaatgttcagtattatactgatatcgtttctaagcatgcattaaaacgtagattgattcaaactgcagatagtattgccaatgatggatataatgatgaacttgaactagatgcgattttaagtgatgcagaacgtcgaattttagagctatcatcttctcgtgaaagcgatggctttaaagacattcgagacgtcttaggacaagtgtatgaaacagctgaagagcttgatcaaaatagtggtcaaacaccaggtatacctacaggatatcgagatttagaccaaatgacagcagggttcaaccgaaatgatttaattatccttgcagcgcgtccatctgtaggtaagactgcgttcgcacttaatattgcacaaaaagttgcaacgcatgaagatatgtatacagttggtattttctcgctagagatgggtgctgatcagttagccacacgtatgatttgtagttctggaaatgttgactcaaaccgcttaagaacgggtactatgactgaggaagattggagtcgttttactatagcggtaggtaaattatcacgtacgaagatttttattgatgatacaccgggtattcgaattaatgatttacgttctaaatgtcgtcgattaaagcaagaacatggcttagacatgattgtgattgactacttacagttgattcaaggtagtggttcacgtgcgtccgataacagacaacaggaagtttctgaaatctctcgtacattaaaagcattagcccgtgaattagaatgtccagttatcgcattaagtcagttatctcgtggtgttgaacaacgacaagataaacgtccaatgatgagtgatattcgtgaatctggttcgattgagcaagatgccgatatcgttgcattcttataccgtgatgattactataaccgtggcggcgatgaagatgatgacgatgatggtggtttcgagccacaaacgaatgatgaaaacggtgaaattgaaattatcattgctaagcaacgtaacggtccaacaggcacagttaagttacattttatgaaacaatataataaatttaccgatatcgattatgcacatgcagatatgatgtaaaaaagtttttccgtacaataatcattaagatgataaaattgtacggtttttattttgttctgaacgggttgatatatgttaagtttgtgtattgaaagtgataaattagtactgtcaacgcctctgttaaagggtttttaggacgttgaaaacgatttgttaaaatgatttttcttttaaaaaggccgaaaatcaatgttcgatttttatttgcattatggtctcgatattggtagaatatcaaatggttaaatgagaaaaacttggaggtgctcacatgtcatcaatcgtagtagttgggacacaatggggagacgaaggaaaaggaaaaataacggatttcttggcagaacagtcagatgttatcgcgcgtttttcaggtggtaataatgcaggccataccattcaatttggcggagaaacatataaattacatttagtaccatctggtatcttttacaaagacaaattagcggtaatcggtaacggagtcgttgttgatccagttgcactattgaaagaattagacggattaaatgaacgtggcattcctacaagtaatttacgtatatctaatcgtgcgcaagtgattttaccatatcacttagcacaagatgaatatgaagaacgtttacgtggtgacaataagattggtacaactaaaaaaggtatcggtccagcatatgtagacaaagttcaacgtatcggtattcgtatggcagatttacttgaaaaagaaacattcgaaagattattaaaatcaaacattgaatataaacaagcatatttcaaaggtatgtttaacgaaacatgtccatcatttgatgatatctttgaagaatattatgcagcaggtcaacgtctaaaagaatttgtaacagacacatcaaaaatcttagacgatgcatttgtagcagatgaaaaggtacttttcgaaggtgcgcaaggtgtaatgttagatatcgaccatggtacatatccattcgttacatcaagtaatccaattgcaggtaacgttactgttggtacaggtgtaggtcctacattcgtttcaaaggtaattggtgtatgtaaagcttatacatcacgtgttggtgatggtccattccctactgaattattcgatgaagatggacatcatattagagaggttggtcgtgaatacggtacaacaacaggacgtccacgtcgtgtaggttggtttgattcagttgtattacgtcactctcgtcgtgtaagtggtattacagatttatctattaactcaatcgatgttttaacaggcctagacacagtgaaaatctgtacagcttatgaattagacggtaaagaaattactgagtacccagcaaacttagatcaattaaaacgttgtaaaccaatctttgaagagttaccaggttggacagaagacgtaacaaatgtgcgtactttagaagaattacctgaaaatgcacgtaaatatttagagcgtatttcagaattatgtaatgtacaaatttctatcttctcagttggtccagatagagaacaaacaaacctattaaaagaattgtggtagaactttatataagtcatacacaatgattataaatacatgagccttctatctttattggtaggaggcttttgttatgcttgcttctgtatcgattcgattatttagataaaaaatactaacgtaaaggcgatatttgctagtcataatttagaagattagatgatatttaacgaaaattaagatgaaatacttgaatgtaagaagtctgatgtcgaaaatagctattaaaatagagtagacgtaagtgtaaatgaaagcacctaaaatagaaaaatttcaaaaatagcgtaattattataatgaatagactgccaataaaatgcaatttttcacttataacattcttcaaaaaataatagcaaaattatgtaaaaaatatcttgtcatggcaagattggctgtgctataatctatcttgtgcttaagaacggctccttggtcaagcggttaagacaccgccctttcacggcggtaacacgggttcgagtcccgtaggagtcaccattttttaggtctcgtagtgtagcggttaacacgcctgcctgtcacgcaggagatcgcgggttcgattcccgtcgagaccgtacaaatgcctatccaagaggataggcatttttttgcgtttaatattatattaataaaagatatatggacgaatgataatcatattgatttatctgttcgtccattttctttaaaatgtatgaacctcaagtaacttagtggttggatatgaaagataaacgtagacaataaaatctttattagacgtacaaacatatgctactgtcaacatatttcttcgttgtgatatgccaccagtcctccataacatcaattgttaaagtaacgaataacgaataatgatatttattttctgagcaatgacgtgcaactagaagttgccattatcctaattttattattggaatagagacctcatcattgtgttaaatatcattgtcacaatccgccgtgagaaactaataaaaaatagtaatatataagtttatattggaaaatagaattaatagcttataaatggtaaattatataataggttactatacgttataagacggaaaatgcgcacaataacaaaaatagtaagcgacatcctgtgattttttacacaaacataaacgataaagaacaaaaaatgataaaataatattaatgatttaagaaaagaggtttatgcaaatggctagaaaagttgttgtagttgatgatgaaaaaccgattgctgatattttagaatttaacttaaaaaaagaaggatacgatgtgtactgtgcatacgatggtaatgatgcagtcgacttaatttatgaagaagaaccagacatcgtattactagatatcatgttacctggtcgtgatggtatggaagtatgtcgtgaagtgcgcaaaaaatacgaaatgccaataataatgcttactgctaaagattcagaaattgataaagtgcttggtttagaactaggtgcagatgactatgtaacgaaaccgtttagtacgcgtgaattaatcgcacgtgtgaaagcgaacttacgtcgtcattactcacaaccagcacaagacactggaaatgtaacgaatgaaatcacaattaaagatattgtgatttatccagacgcatattctattaaaaaacgtggcgaagatattgaattaacacatcgtgaatttgaattgttccattatttatcaaaacatatgggacaagtaatgacacgtgaacatttattacaaacagtatggggctatgattactttggcgatgtacgtacggtcgatgtaacgattcgtcgtttacgtgaaaagattgaagatgatccgtcacatcctgaatatattgtgacgcgtagaggcgttggatatttcctccaacaacatgagtagaggtcgaaacgaatgaagtggctaaaacaactacaatcccttcatactaaacttgtaattgtttatgtattactgattatcattggtatgcaaattatcgggttatattttacaaataaccttgaaaaagagctgcttgataattttaagaagaatattacgcagtacgcgaaacaattagaaattagtattgaaaaagtatatgacgaaaagggctccgtaaatgcacaaaaagatattcaaaatttattaagtgagtatgccaaccgtcaagaaattggagaaattcgttttatagataaagaccaaattattattgcgacgacgaagcagtctaaccgtagtctaatcaatcaaaaagcgaatgatagttctgtccaaaaagcactatcactaggacaatcaaacgatcatttaattttaaaagattatggcggtggtaaggaccgtgtctgggtatataatatcccagttaaagtcgataaaaaggtaattggtaatatttatatcgaatcaaaaattaatgacgtttataaccaattaaataatataaatcaaatattcattgttggtacagctatttcattattaatcacagtcatcctaggattctttatagcgcgaacgattaccaaaccaatcaccgatatgcgtaaccagacggtcgaaatgtccagaggtaactatacgcaacgtgtgaagatttatggtaatgatgaaattggcgaattagctttagcatttaataacttgtctaaacgtgtacaagaagcgcaggctaatactgaaagtgagaaacgtagactggactcagttatcacccatatgagtgatggtattattgcaacagaccgccgtggacgtattcgtatcgtcaatgatatggcactcaagatgcttggtatggcgaaagaagacatcatcggatattacatgttaagtgtattaagtcttgaagatgaatttaaactggaagaaattcaagagaataatgatagtttcttattagatttaaatgaagaagaaggtctaatcgcacgtgttaactttagtacgattgtgcaggaaacaggatttgtaactggttatatcgctgtgttacatgacgtaactgaacaacaacaagttgaacgtgagcgtcgtgaatttgttgccaatgtatcacatgagttacgtacacctttaacttctatgaatagttacattgaagcacttgaagaaggtgcatggaaagatgaggaacttgcgccacaatttttatctgttacccgtgaagaaacagaacgaatgattcgactggtcaatgacttgctacagttatctaaaatggataatgagtctgatcaaatcaacaaagaaattatcgactttaacatgttcattaataaaattattaatcgacatgaaatgtctgcgaaagatacaacatttattcgagatattccgaaaaagacgattttcacagaatttgatcctgataaaatgacgcaagtatttgataatgtcattacaaatgcgatgaaatattctagaggcgataaacgtgtcgagttccacgtgaaacaaaatccactttataatcgaatgacgattcgtattaaagataatggcattggtattcctatcaataaagtcgataagatattcgaccgattctatcgtgtagataaggcacgtacgcgtaaaatgggtggtactggattaggactagccatttcgaaagagattgtggaagcgcacaatggtcgtatttgggcaaacagtgtagaaggtcaaggtacatctatctttatcacacttccatgtgaagtcattgaagacggtgattgggatgaataataaggagcatattaaatctgtcattttagcactactcgtcttgatgagtgtcgtattgacatatatggtatggaacttttctcctgatattgcaaatgtcgacaatacagatagtaagaagagtgaaacgaaacctttaacgacacctatgacagccaaaatggatacaactattacgccatttcagattattcattcgaaaaatgatcatccagaaggaacgattgcgacggtatctaatgtgaataaactgacgaaacctttgaaaaataaagaagtgaagtccgtggaacatgttcgtcgtgatcataacttgatgattcctgatttgaacagtgattttatattattcgattttacgtatgatttaccgttatcaacatatcttggtcaagtactgaacatgaatgcgaaagtaccaaatcatttcaatttcaatcgtttggtcatagatcatgatgctgatgataatatcgtgctttatgctataagcaaagatcgccacgattacgtaaaattaacaactacaacgaaaaatgatcattttttagatgcattagcagcagtgaaaaaagatatgcaaccatacacagatatcatcacaaacaaagatacaattgatcgtacgacgcatgtttttgcaccaagtaaacctgaaaagttaaaaacatatcgcatggtatttaacacgattagtgttgagaaaatgaatgctatactatttgacgattcaaccatcgttcgtagttcaaagagtggtgttacaacctacaacaataatacaggtgtcgcaaactataacgataaaaatgaaaaatatcattataaaaacctgtccgaagatgaagcgagttccagcaaaatggaagaaacgattccaggaacctttgattttattaatggtcatggtggtttcttaaacgaagactttagattgtttagtacgaataatcagtcaggcgagttaacatatcaacgtttccttaatggttatccaacgtttaataaagaaggttctaatcaaattcaagtcacttggggtgaaaaaggcgtctttgactatcgtcgttcgttattacgcaccgacgttgttttaaatagtgaggataataaatcgttgccgaaattagagtctgtacgttcaagcttagcgaacaatagtgatattaattttgaaaaagtaacaaacatcgctatcggttacgaaatgcaggataattcagatcataatcacattgaagtgcagattaacagtgaactcgtaccgcgttggtatgtagaatatgatggcgaatggtatgtttataacgatgggaggcttgaataaatgaactggaaactgacaaagacacttttcattttcgtgtttattcttgtcaacatcgtgttagtatcgatttatgttaataaagtcaatcgctcacacattaatgaagtcgagagtaacaatgaagttaattttcagcaagaagaaattaaagtaccgactagtatattgaataaatcagttaaaggtataaaattagagcaaattacagggcgatcaaaagactttagttctaaagctaaaggcgattcggatttgaccacatcagatggtggaaaattattgaatgcgaacattagtcaatcggtaaaggtcagtgacaataacttaaaagatttgaaagattatgttaacaagcgcgtatttaaaggtgctgaatatcaattaagcgagattagttcagattctgtaaaatatgaacaaacgtatgatgattttccgattttaaataacagtaaagcgatgttgaactttaatatagaagataacaaagcgactagttataaacaatcaatgatggatgacattaagcccacagatggtgcagataagaagcatcaagtgattggtgtgagaaaagcaatcgaggcattatattataatcgttacttgaaaaaaggtgatgaagtcattaatgctagactcggttactactcagtcgtgaatgaaacgaatgttcaattgttacaaccaaactgggaaattaaagtgaagcatgacggtaaggataaaacgaatacttactatgtcgaagcgacaaataataaccctaaaattattaatcattaatatgaatcgtaataagctagcattgcaagctcatcatatgtgagaagcggtgctagcttttttgctggtacggtttattatggctgatgtttttgcgtctccaacgtgcgcatttattcatattttaagtagaaccgcattgtaaaattagtgtaactgttattttaaaaactttagtatttgtctaatcattgttataataattaagaaattcattgcacgtgattatcaaaatttaaatataagaaaccggtcgatgaactaaagttacataataggaaaggtatacaaaacagctaatatactgatagtttctgtagggaaaatcgtatatttgcactgatgtatattgcagtcatatagagagattgactgtttaaagagaaaggatgagccgcttgatacgcatgagtgtattagcaagtggtagtacaggtaacgccacttttgtagaaaatgaaaaaggtagtctattagttgatgttggtttgactggaaagaaaatggaagaattgtttagtcaaattgaccgtaatattcaagatttaaatggtattttagtaacccatgaacatattgatcatattaaaggattaggtgttttggcgcgtaaatatcaattgccaatttatgcgaatgaaaagacttggcaggcaattgaaaagaaagatagtcgcatccctatggatcagaaattcatttttaatccttatgaaacaaaatctattgcaggtttcgatgttgaatcgtttaacgtgtcacatgatgcaatagatccgcaattttatattttccataataactataagaagtttacgattttaacggatacgggttacgtgtctgatcgtatgaaaggtatgatacgtggcagcgatgcgtttatttttgagagtaatcatgacgtcgatatgttgagaatgtgtcgttatccatggaagacgaaacaacgtattttaggcgatatgggtcatgtatctaatgaggatgcggctcatgcaatgacagacgtgattacaggtaacacgaaacgtatttacctatcgcatttatcacaagacaataacatgaaagatttggcgcgtatgagtgttggccaagtattgaacgaacacgatattgatacggaaaaagaagtattgctatgtgatacggataaagctattccaacgccaatatatacaatataaatgagagtcatccgataaagttccgcattgctgtgagacgactttatcgggtgcttttttatgttgttggtgggaaatggctgttgttgagttgaatcggcttgattgaaatgtgtaaaataattcgatattaaatgtaatttataaataatttacataaaatcaatcattttaatataaggattatgataatatattggtgtatgacagttaatggagggaacgaaatgaaagctttattacttaaaacaagtgtatggctcgttttgctttttagtgtaatgggattatggcaagtctcgaacgcggctgagcagcatacaccaatgaaagcacatgcagtaacaacgatagacaaagcaacaacagataagcaacaagtaccgccaacaaaggaagcggctcatcattctggcaaagaagcggcaaccaacgtatcagcatcagcgcagggaacagctgatgatacaaacagcaaagtaacatccaacgcaccatctaacaaaccatctacagtagtttcaacaaaagtaaacgaaacacgcgacgtagatacacaacaagcctcaacacaaaaaccaactcacacagcaacgttcaaattatcaaatgctaaaacagcatcactttcaccacgaatgtttgctgctaatgcaccacaaacaacaacacataaaatattacatacaaatgatatccatggccgactagccgaagaaaaagggcgtgtcatcggtatggctaaattaaaaacagtaaaagaacaagaaaagcctgatttaatgttagacgcaggagacgccttccaaggtttaccactttcaaaccagtctaaaggtgaagaaatggctaaagcaatgaatgcagtaggttatgatgctatggcagtcggtaaccatgaatttgactttggatacgatcagttgaaaaagttagagggtatgttagacttcccgatgctaagtactaacgtttataaagatggaaaacgcgcgtttaagccttcaacgattgtaacaaaaaatggtattcgttatggaattattggtgtaacgacaccagaaacaaagacgaaaacaagacctgaaggcattaaaggcgttgaatttagagatccattacaaagtgtgacagcggaaatgatgcgtatttataaagacgtagatacatttgttgttatatcacatttaggaattgatccttcaacacaagaaacatggcgtggtgattacttagtgaaacaattaagtcaaaatccacaattgaagaaacgtattacagttattgatggtcattcacatacagtacttcaaaatggtcaaatttataacaatgatgcattggcacaaacaggtacagcacttgcgaatatcggtaagattacatttaattatcgcaatggagaggtatcgaatattaaaccgtcattgattaatgttaaagacgttgaaaatgtaacaccgaacaaagcattagctgaacaaattaatcaagctgatcaaacatttagagcacaaactgcagaggtaattattccaaacaataccattgatttcaaaggagaaagagatgacgttagaacgcgtgaaacaaatttaggaaacgcgattgcagatgctatggaagcgtatggcgttaagaatttctctaaaaagactgactttgccgtgacaaatggtggaggtattcgtgcctctatcgcaaaaggtaaggtgacacgctatgatttaatctcagtattaccatttggaaatacgattgcgcaaattgatgtaaaaggttcagacgtctggacggctttcgaacatagtttaggcgcaccaacaacacaaaaggacggtaagacagtgttaacagcgaatggcggtttactacatatctctgattcaatccgtgtttactatgatataaataaaccgtctggcaaacgaattaatgctattcaaattttaaataaagagacaggtaagtttgaaaatattgatttaaaacgtgtatatcacgtaacgatgaatgacttcacagcatcaggtggcgacggatatagtatgttcggtggtcctagagaagaaggtatttcattagatcaagtactagcaagttatttaaaaacagctaacttagctaagtatgatacgacagaaccacaacgtatgttattaggtaaaccagcagtaagtgaacaaccagctaaaggacaacaaggtagcaaaggtagtaagtctggtaaagatacacaaccaattggtgacgacaaagtgatggatccagcgaaaaaaccagctccaggtaaagttgtattgttgctagcgcatagaggaactgttagtagcggtacagaaggttctggtcgcacaatagaaggagctactgtatcaagcaagagtgggaaacaattggctagaatgtcagtgcctaaaggtagcgcgcatgagaaacagttaccaaaaactggaactaatcaaagttcaagcccagaagcgatgtttgtattattagcaggtataggtttaatcgcgactgtacgacgtagaaaagctagctaaaatatattgaaaataatactactgtatttcttaaataagaggtacggtagtgtttttttatgaaaaaaagcgataaccgttgataaatatgggatataaaaacgaggataagtaataagacatcaaggtgtttatccacagaaatggggatagttatccagaattgtgtacaatttaaagagaaatacccacaatgcccacagagttatccacaaatacacaggttatacactaaaaatcgggcataaatgtcaggaaaatatcaaaaactgcaaaaaatattggtataataagagggaacagtgtgaacaagttaataacttgtggataactggaaagttgataacaatttggaggaccaaacgacatgaaaatcaccattttagctgtagggaaactaaaagagaaatattggaagcaagccatagcagaatatgaaaaacgtttaggcccatacaccaagatagacatcatagaagttccagacgaaaaagcaccagaaaatatgagtgacaaagaaattgagcaagtaaaagaaaaagaaggccaacgaatactagccaaaatcaaaccacaatccacagtcattacattagaaatacaaggaaagatgctatcttccgaaggattggcccaagaattgaaccaacgcatgacccaagggcaaagcgactttgttttcgtcattggcggatcaaacggcctgcacaaggacgtcttacaacgcagtaactacgcactatcattcagcaaaatgacattcccacatcaaatgatgcgggttgtgttaattgaacaagtgtacagagcatttaagattatgcgaggagaagcatatcataaatgatgcggttttttcagccgcttcataaagggattttgaatgtatcagaacatatgaggtttatgtgaattgctgttatgtttttaagaagcttatcataagtaatgaggttcatgatttttgacatagttagcctccgcagtctttcatttcaagtaaataatagcgaaatattctttatactgaatacttatagtgaagcaaagttctagctttgagaaaattctttctgcaactaaatatagtaaattacggtaaaatataaataagtacatattgaagaaaatgagacataatatattttataataggagggaatttcaaatgatagacaactttatgcaggtccttaaattaattaaagagaaacgtaccaataatgtagttaaaaaatctgattgggataaaggtgatctatataaaactttagtccatgataagttacccaagcagttaaaagtgcatataaaagaagataaatattcagttgtagggaaggttgctactgggaactatagtaaagttccttggatttcaatatatgatgagaatataacaaaagaaacaaaggatggatattatttggtatatctttttcatccggaaggagaaggcatatacttatctttgaatcaaggatggtcaaagataagtgatatgtttccgcgggataaaaatgctgcaaaacaaagagcattaactttatcttccgaactcaataaatatattacatcaaatgaatttaatactggaagattttattacgcagaaaataaagattcatcttatgatttaaaaaatgattatccatcaggatattctcatggatcaataagattcaaatattatgatttgaatgaaggattcacagaagaagatatgctagaggatttaaagaaatttttagaactatttaatgaattagcttcaaaagttacaaaaacatcctatgatagcttggtcaatagcatagacgaaatacaggaagacagcgaaattgaagaaattagaacagcacaaaaagataagacactcaaggaagtggaagcacctaaaggaataattccaaaatataaaaaaggtgtatcaaagactactaaaaatgattcagaaattgaaaaatcaaataaagagaataaattaaccggtaaagttggagaaaaattagcgctaaattactttaatgagctaattgataataaaatagacgaagataagaaagaacagtttaggaatattttaaatgataatccaggctctcaacacggtcatggctatgatttagtagcttttgatccaacaaatacagataaagctgtagaaaaatttattgaaattaaaacatctacatcttctagtattgaggaaccattttttatgtcgctaaatgaaatgtttgctatgaaagaatataagcagaaatatttaatattaagaatatttaatgtttccggtaaagaaccacaattttattttatagatccatatgcaaattattctgaatttaaagatgtagatgatctcattgacaaagtatttaatgtagaagctattcagtataaagtttttggcgaaaaatgattacttgaacaagagctaaaataaaattgtgatctaataaaaatagaaggttctgttgcaaagtaaaaaaatatagctaaccactaatttatcatgtcagtgttcgcttaacttgctagcatgatgctaatttcgtggcatggcgaaaatccgtagatctgaagagacctgcggttctttttatatagagcgtaaatacattcaataccttttaaagtattctttgctgtattgatactttgataccttgtctttcttactttaatatgacggtgatcttgctcaatgaggttattcagatatttcgatgtacaatgacagtcaggtttaagtttaaaagctttaattactttagccattgctaccttcgttgaaggtgcctgatctgtaattaccttttgaggtttaccaaattgtttaatgagacgtttgataaacgcatatgctgaatgattatctcgttgcttacgcaaccaaatatctaatgtatgtccctctgcatcaatggcacgatataaatagctccattttccttttattttgatgtacgtctcatcaatacgccatttgtaataagcttttttatgctttttcttccaaatttgatacaaaattggggcatattcttgaacccaacggtagaccgttgaatgatgaacgtttacaccacgttcccttaatatttcagatatatcacgataactcaatgtatatcttagatagtagccaacggctacagtgataacatccttgttaaattgtttatatctgaaatagttcatacagaagactcctttttgttaaaattatactataaattcaactttgcaacagaaccgtattatggaatagagatgttggtaacatttatacaggatcattatacttaagtttaatttcgttattacagaaccacacattccaaccagaagagaaagtatgtctatttagttatggttcaggagcagtaggagaaatctttagtggttcaatcgttaaaggatatgacaaagcattagataaagagaaacacttaaatatgctagaatctagagagcaattatcagtcgaagaatacgaaacattctttaacagatttgataatcaagaatttgatttcgaacgtgaattgacacaagatccatattcaaaagtatacttatacagtatagaagaccatatcagaacatataagatagagaaataaactagtggccgattgtgcttgatgagcttgggacataaatcctaactcgaaataaataagcatatcactaaactgattttttaaagtttacagtgatatgcttatttttttatcttacgattttgtacgtgcatgcttgcctaggggtatggctcgagccattagtctctcgcacatactattccctcaggcgtcagcacttacaaaatcggttgtaattttcatttttatacgcattcttactgagattatactaataagaggaatagtaaaagcaattctaagtaaaattgcagataagaggtttgttaaaagcagttctcagtaaaattacagataagaggtacgttaaaagcagttctaagtaaaattgcagataagaggtttgttaaaagcagttctaagtaaaattgcagataagaggtacgttaaaagcaattccatgcaaaattgctgataaggggtaagttaaaagcagttctcagtaaaattgcagataagaggtacgttaaaagcagttctaggcaaaattgcagataagaggtgcgttaaaagcagttctcagtaaaattgctgataaggggtaagttaaaagcaatcctaagtaaaattgcagataaggggtacagaaaaactagacttgattacaaaatggagcttgggacataaatgattttttaaaaatgagatgagacgtagattaactccataatcaatacgaatctatcgacttctttatttatgatattcatctctttttaatggaaataaaagtgcgattaatgtgataatacagttacgttaattaaaaaaataaaaatgcaaggagaggtaatatgctaactgtatatggacatagaggattacctagtaaagctccggaaaatacaattgcatcatttaaagctgcttcagaagtagaaggtataaactggttggagttagatgttgcaattacaaaagatgaacaactgattatcattcatgatgattatttagaacggactacaaatatgtccggggaaataactgaattgaattatgatgaaattaaagatgcttctgcaggatcttggtttggtgaaaaattcaaagatgaacatttgccaactttcgatgatgtagtaaaaatagcaaatgaatataatatgaatttaaatgtagaattaaaaggtattactggaccgaatggactagcactttctaaaagtatggttaagcaagtggaagaacaattaacaaacttaaatcagaatcaagaagtgctcatttcaagctttaatgttgtgcttgttaaacttgcagaagaaatcatgccacaatataacagagcagttatattccatacaacttcgtttcgtgaagactggagaacacttttagattactgtaatgctaaaatagtaaacactgaagatgccaaacttactaaagcaaaagtaaaaatggtaaaagaagcgggttatgaattgaacgtatggactgtaaacaaaccagcacgtgcaaaccaacttgctaattggggagttgatggtatctttacagacaatgcagataaaatggtgcatttgtctcaatagaaagttagaggtgagtcttacgtttcagtgacggtagacttacctttaacatgttacatactaaaaaattaatttgaataagaaagagagacatatatgaaatacgatgattttatagtaggagaaacattcaaaacaaaaagccttcatattacagaagaagaaattatccaatttgcaacaacttttgatcctcaatatatgcatatagataaagaaaaagcagaacaaagtagatttaaaggtatcattgcatctggcatgcatacactttcaatatcatttaaattatgggtagaagaaggtaaatacggagaagaagttgtagcaggaacacaaatgaataacgttaaatttattaaacctgtatacccaggtaatacattgtacgttatcgctgaaattacaaataagaaatccataaaaaaagaaaatggactcgttacagtgtcactttcaacatacaatgaaaatgaagaaattgtatttaagggagaagtaacagcacttattaataattcataataaaacagtgaagcaaccatcgttacggattgcttcactgttttgttattcatctatatcgtattttttattaccgttctcatatagctcatcatacactttacctgagattttggcattgtagctagccattcctttatcttgtacatctttaacattaatagccatcatcatgtttggattatctttatcatatgatataaaccacccaatttgtctgccagtttctccttgtttcattttgagttctgcagtaccggatttgccaattaagtttgcataagatctataaatatcttctttatgtgttttatttacgacttgttgcataccatcagttaatagattgatattttctttggaaataatatttttcttccaaactttgtttttcgtgtcttttaataagtgaggtgcgttaatattgccattattttctaatgcgctatagattgaaaggatctgtactgggttaatcagtatttcaccttgtccgtaacctgaatcagctaataatatttcattatctaaatttttgtttgaaatttgagcattataaaatggataatcacttggtatatcttcaccaacacctagttttttcatgcctttttcaaatttcttactgcctaattcgagtgctactctagcaaagaaaatgttatctgatgattctattgcttgttttaagtcgatattaccatttaccacttcatatcttgtaacgttgtaaccaccccaagatttatctttttgccaacctttaccatcgattttataacttgttttatcgtctaatgttttgttatttaacccaatcattgctgttaatattttttgagttgaacctggtgaagttgtaatctggaacttgttgagcagaggttcttttttatcttcggttaatttattatattcttcgttactcatgccatacataaatggatagacgtcatatgaaggtgtgcttacaagtgctaataattcacctgtttgagggtggatagcagtacctgagccataatcatttttcatgttgttataaatactcttttgaactttagcatcaatagttagttgaatatctttgccatcttttttctttttctctattaatgtatgtgcgattgtattgctattatcgtcaacgattgtgacacgatagccatcttcatgttggagctttttatcgtaaagtttttcgagtccctttttaccaataactgcatcatctttatagcctttatattctttttgttttaattcttcagagttaatgggaccaacataacctaatagatgtgaagtcgcttttcctagaggatagttacgactttctgtttcattagttgtaagatgaaatttttttgcgaaatcacttaaatattcatccatttttttaacggttttaagtggaacgaaggtatcatcttgtacccaattttgatccatttgttgtttgatatagtcttcagaaatacttagttctttagcgattgctttataatcttttttagatacattctttggaacgatgcctatctcatatgctgttcctgtattggccaattccacattgtttcggtctaaaattttaccacgttctgattttaaattttcaatatgtatgctttggtctttctgcattcctggaataatgacgctatgatcccaatctaacttccacataccatcttctttaacaaaattaaattgaacgttgcgatcaatgttaccgtagtttgttttaattttatattgagcatctactcgttttttatttttagatactttttttattttacgatcctgaatgtttatatctttaacgcctaaactattatatatttttatcggacgttcagtcatttctacttcaccattatcgcttttagaaatataactgctatctttataaacttgtttgaaatttttatcttcaattgcatcaatagtattattaatttctttatcttttgaagcataaaaatatataccaaacccgacaactacaactattaaaataagtggaacaatttttatctttttcatcaatatactccttatataagactacatttgtagtatattacaaatgtagtatttatgtcaaaataatgttataatttttgtgatatggaggtgtagaaggtgttatcatcttttttaatgttaagtataatcagttcattgctcacgatatgtgtaatttttttagtgagaatgctctatataaaatatactcaaaatattatgtcacataagatttggttattagtgctcgtctccacgttaattccattaataccattttacaaaatatcgaattttacattttcaaaagatatgatgaatcgaaatgtatctgacacgacttcttcggttagtcatatgttagatggtcaacaatcatctgttacgaaagacttagcaattaatgttaatcagtttgagacctcaaatataacgtatatgattcttttgatatgggtatttggtagtttgttgtgcttattttatatgattaaggcattccgacaaattgatgttattaaaagttcgtcattggaatcgtcatatcttaatgaacgacttaaagtatgtcaaagtaagatgcagttctacaaaaagcatataacaattagttatagttcaaacattgataatccgatggtatttggtttagtgaaatcccaaattgtactaccaactgtcgtagtcgaaaccatgaatgacaaagaaattgaatatattattctacatgaactatcacatgtgaaaagtcatgacttaatattcaaccagctttatgttgtttttaaaatgatattctggtttaatcctgcactatatataagtaaaacaatgatggacaatgactgtgaaaaagtatgtgatagaaacgttttaaaaattttgaatcgccatgaacatatacgttatggtgaatcgatattaaaatgctctattttaaaatctcagcacataaataatgtggcagcacaatatttactaggttttaattcaaatattaaagaacgtgttaagtatattgcactttatgattcaatgcctaaacctaatcgaaacaagcgtattgttgcgtatattgtatgtagtatatcgagcttcacatgaaacagctaaagaagctttgggcgataaagagttaagagccattgcacatgagttaactaaaacagttaaggataacatgagtgttgattggtctaaacgagacagtgctaaagctaaaatgagagttcaagttagacgcctattaaagaaatatggctatccaccagatcttcaaaaaatggctgtggaacaagttgtagagcaagcagaattaatggcaagtcagcaataaaaaaataaatcataatgagtccgggacataaagttcttggataagtgaaaaaagacaatttctattgaaataatatagaaattgtcttttttataaattttttgattattttcagctcgttgagctactacttttcttatattaagtgccattaatacaaaaccaagttctcttttgactttattgagtcctcggacagacatccgagtgaaacccaaaatagccttcataaatccaaaaacaggttccacatcaatttttctttgactgtagatattttttgtttctggttctgaaagctttttgttaatttgggatttaaaatattcccagttataattcttcattatttttttgtttgtttttgaattgaagttcatacattgatttttcagaggacattctgaacaatcatcacattcatataatttgaagtctcgcttataaccatacttatcatgacgataggcatatcttttaaaacctagccgtttattattcggacaaatgaattcgtcattaatttcgtcatagttccaattttgagtattaaagatgtcacttttatattttttagttttatcttttataaacattccatatgttatgagtggcgttcgattaaagtcatctataattgccttataatttgattcactaccataacctgcatcagctacaatatattcaggtaaatgaccgtaggtctcttgaattgaatttaaaaatggaatcatcgttctagtatccgttggattttgatacacattataagataaaacaaattgggaatttgttgctatttgtaaattataccctggcttaagttgtccatttttcatgtgatcttctttcattctcataaatgtcgcatcataatctgtcttagaataactatttctatcctttaaaatagatttttgaaattcgtatcgatactttcgctcaaaataatcattgatttgctttttgtattttttgattttagttcttttgagacgtatttgttttcttgttttagtacatttttcattgttgatatgttggtttaaatcttcgatttctttatctaagtgactaccaatcaaatctatttcttcttttgttaattcattatcatgatcttctttaatttccggtatgattttattggttaccaattcatggtagagggctttagaatcctcattcatctttgattcatggttttgaatactctttttccatacaaatgtatatcgattggcatttgcttcaatttttgtaccatcaataaaaatagctttatcatctataagattttgttttacacactgactgtaaaattgaataaataaagattctaataaagcatctacttttggatttactctaaattgattaattgttttataagaaggtttttgattttgtgatagccacatcattcggatgctatcattaagcattttttctattttacgacctgagaatacagattgtgtgtaggcatatagaatcacttttaacatcattttaggatggtacgaagttgcaccacggtgatgtctgaattcgtcgaattcattgtcaggaattgtttcaacaatatcatttacagtaaaacgatgttgatttgttttgtttccatattgacctccatgtatttgctatgatttcaaaatccatttttgacgtgccttagggttgagtggatgcataatttcatttgttactggattgatgagcttttttactttctttttatgaggttttaacatttccatcacttgttcgacacggtcgataacaactggtcgcttcgcataggcaccataagcaagaatcactgtgtcactttcactaatcgctttcatcaaatgaatatcagtgtgctcatcgtatggatttttgatatgtttgaggttttcgggtgttctaatattagagaatagatttacaagatatacagcaccgtatcgttctgaattggctaattggttgaggataagaacagttgtgagatcgagtgataatacaccgtctaaatgaggatacatcgttatcactgtgcatgcagctttcttttcatcccatgttttcttgagtaaatagcggtgctgttcatcatcgctaaatatggcttctgtgtgtatcgtacttttgattgtattcatcatcgtcacttcctttagtattcttctggtaaaagcatcacataataaaaagcgtccacgtcatcttcacgaatgacgtagactttcttaggtaatgcattttgatttttttcatagtttgtatagtgatattccaatttgtatgtgggttgttcttgttcatgtgtgattgagagtatattctcatcttcttgtaatttaaaaatgtgtaggtaatctgtatgaggctggttatcttttttttctaccatgtgccaaagtaagatttgaaggtctagtggaatactttcattaattcctcttgtgatgtatcgattgattttcatgctatttccctcccttctgcttttctttcatgatgtcgatgatttcgttgataactgtgacggataattgagcaactatgatccaattattcatggtcctgacctccttgttttagtaaatgacgttcatcaataatgatattttgagtatctgtaaggtacagaaagtccatgtcaaaatggtctaagtatccgacactgatgagttggttattggcatacattagaaatggatagatacttagctcatgtagttcatcattatagtaggtataagtctcgagtgtgagatgtaccagtggagaatcattaataaaacgttccggtagaatattttctgctgcttcctccagcgcttcacattcccaagcttcgttattagatagttggaataggtgggttatatattgtttgagttcttgagtgatggttttcatattattgcctcctagatagtgtaatagtgatgtagttcatatacatcattgagataatatatatttgatttgtcatttattacgaatcccggtgggaataagagaaaattccatataaaaacccgctacaaacgttggtatgccaaggaaatcctgaaattccgcctattttgacaaacaatcaactcattatttataagtattgatgatagggttgtgtctctgcttccttatatatattatttatttataaaaagtaacgggattttgggattgtgcttgcacaatccttctgtttcttcgaatctgcaaatcccaatcatttcccgataaaaaatcattgtgggatgttctttagcaatttcaatataagcattgtatagttatgaaaaaattacgacaataactgtttcattagataagtgttattgaaattgataaagagcaattcttgaaaatagttagataaaataagcgaaagaatatagtgaaaattattgttataacaatgattctattagctaaatagtaagatatagtgtttggggcaaaaataaagacgaagtgctgagatgcacttcgtcgagttgtttattattgaaaagttgtttaatgatttcgttattaagtttgagtgtgacatagaattgttttttatgattaccatcttttttaatatcaatgcgatcaatcactgatagatacaatgctttgagtcgagatttttctatgtgcttaatatcatgaaagatgtgttgtaatagtttactgatttctttggcatcaaataaagtcttatcttcattttgttgatttttgagttggttgatttgattcgtaatgtcattgagttgcttttcatatttttgaatacttggtctgattactgatgttaagtccggattatcctcgatggttttaatcaagttatttattttgatttgtacttcatcatattgttgttgcttataagcaatatcgtgatgaagtgcagcgccatcaacttgattttcttgattgacgtgtgttactacgcgttgaatgactttatcacttttgactatttcaagtatttgcttcatcacataatcttcaatcacatcagctcttacactgtttgccgaacatactttggaacccttgttccgaaaattactacatgaatagtaacgaatacgtttcttagtcccgtctttaagagtattcgtggtattgcttgctgccataggtgcgccacattggggacagtgaataatgcctgtaagcagattcgttcctttgccatggacttggggtttttgactgacttgtttcttacgcatttgtactttatcccataaatcttgattaataatgggggaatgcttaccttcagctatcactggtttatcattcagccctttacgacgtttttcactccaatctttgtatttcgcaaattgaattttgccgatatagaaagggttagctaagatgtatgtgattgaactaatactgaaaggtttcccctttttagtgacatatcctttgtgattcaatgcattggcaattttacgatagccatgtcctttggcatagcactcgaatatatattttacaatattagcttcatgttggttaatcattagctcgtgtttactatctggtattttgtcataacctagtggtaaattgccttgataatagccttcttgggcacgtctcgtttgacccataaatacgttctcgacaatgttattacgttcgaattctgagaaactcgcaagtatctgtaacatgagtttaccagaagaagtattgacttccatacgctctgacaaactgaaaaattcgacattttgtttgtgtaaatcttcgacaattttgagaagatcagatgtattacgagctaatcggtttgttttgtataccataacacagtcgatattgccttcttttgcatctttcaacatacgttggagctcaggtctgttcatagatttacctgaaataccacggtcagcgtatatatctttaacttcaaaatgatggaagtcacagtattctttgatttgattgatttgtccgtcgatactataaccttctgtgctttgcatttctgttgatacacgtacatagataccgacacgttttgttttaagttgttgcattatgttacatcctttcttcatttatgcaatcgatgattgcatggtttgattgacaatattgagtggttcatttttgaaatagattcctataagatttttatctttcgtaatgtgaatggtttcaatataggggtacaatatgtttaacgtgaaacgtttttgaataatattttgaatgatgtgttgtatttgatgcccattgatagatgtagtgcgttgcggttgttgacgtaatgattgtgtttgctctctgaacgtttctgcatcaatgatgccttgtgccaacttttctatcagttgttcttgagtcaatgtgtgatgtttttctatgtttctttgtcttttgatgcgtttgtcaatcgcacttttaatttttgtgtagatgcgttgattttgataaaagtctcggcacacttctaatactttatcttcaagtgtttgtgcattgatgcctttaaaatcacagacaaagcgtgaagcattcatgtttttaggacagacgtagtaacgtaatgtatgattcttttttctaatggtcatatttgtaagtgttgcattacaacatgggcatttgattttttgtttgagttgattatccgaaggtgtctgtttggtttgtttttgcaatcgaagtctctgcgcttgctcatatatacttgtggaaacaatagaaggaaacatattgtcgaattggccatattgattgttgacacgaccacaataattaggattgatgataatgttacgaacttgatagggttgtcgattgatatacgtgttatcttcttctaataactgtgcaattttcttataaccatgacctttaatgtaataattgaatacagcctttaccgttggtgactcattttgattgatgatgaatgttccgttgtgatattcgtaaccaaaaggtgcatgtgttgtaatcaatcgaccttgctttgctttttcttgaagcccatttctgacttgttctccaatgttatccgattcaagttcggctaaactgatgaagatattaagcttgagtcggtcgaaagcttgatccatatcaaagtaaccatcatgtacgcttaagatatgaacatggtacgtttgacataatttgatgagttttaatgcatttttcagattacgatgcaacctattaagacgataacagcataatatgtcacactgtccttgttgaattaattgtgttatttgtcgatacccactacgattatctttgcgacctgattgtttgtcgctataaaagttgatatgttgaatatgatgtttttcggctattgcttcgatagcttgtttctgtgctgcaagagattgttgtttcatcgtactttgacgtaaatagcctatgacttgtttcatatcggctcctcctttcacagtgataatatatatttatggatgaattgatatataagcccaacatcaatgagatgttgggcgtccatattagtcatttgtttgattgatttcttcaattaccaaatcggctaatatctcgataagttcatccatgtttttcactccgttatttgttctatcttcaatacgtcgattattcagtttgatgcttcacagttgtatgataaagacaattagaaatcttcgtgaactcctgaagggcctatcccttcattagcggatttaaaaagttctttcgcagctttgttatcatttgacggtgtccaattttgaagtaacgacttatctttagttaatccgaggatagatgcaaactctacatctaattttagatggtaaaatacaagtgattgttttttaccgctattatctttgacacttcttttagttgtttggcgtccacggtcagctaatatgaaacctttatctcttaaggcgttgacaacattattaacatcttgaaattgatgattgtttagcatctgtttaaaaacgttcgcaattatttttacttcgatatggtcatcttttaatgagattaatccatagttctcaaacatatttttcaaagcaccttcatctgaaaacttacctctgttttgtgccacaaattgaatgatgacatcaatagctttatcagctaatgagcgttcagagactgtatgagtatgataatcaataaagtagtctcttatattagcgatatcaatatctgtagataaaacacgacctaatattttcgcagatgttgtaatgactgcataacgcttaaacatacgaatacctgtattgtttgtttcatctttcaatttagcttcaaaccaatctacttccttgtaaaaccattgaataacttcatcttcacgatttataagatatttagctactaacggtaaaacatgaccatagtttagtgctacagcttttttaatattgtcagcattggtcgcatttgtagtgaattgttcattaatctcgatggttcttacacgtaatccatcgttttgagctgaatcattaaaaatactgtattctgacgttgaaatgacagaagtaccccaattcttaggcgttttaacttctccatgaacgtttgaacgttgacgaccttgaccttcagcgatggaatataacaaacccgtggtatctctaagtgtcgtagatgaaagctcatcaaatactataggaatgccataattgttactcaaataaccttcaagtgcgtttcgtgtggcattccaacttctaaaaagagtttcattacctttggtagggttaccagcgactgatacagctaaagcagctgcggttgacttaccggttgaggattgacctgtaaaactaaagagaattcctgcaaattcgatttcatgtttatgcttcagaaaacttgtcactaaggcagaaatcccaaatatgactgccaattctaaaagaagatgacctttaacctcgtcaatatacatgttaaaccaattatcaaatgtacctttaggagttaagtcataagcactatctacaatagggtatgaaggtgaggactgattaaattgaatagatttgagaactttatctagcgatatcaagtagccaaaaggtgtctctagtatacctacaccctcatataattcagaaagtggtaatctatctcgcatcaattgcaaggcataactcaatgatctaatatacttctcgttaatactgtagccatatttaattaaagaaggtaagtttcgtgttgttaagatatcagactcaaaaatgtcttttttaccattgttgttagtaataatcaacttttcaacaccagtaattggatcagaaaatcttgcattaacaataatagggctagccattctaaccactttttcactgtcaccatcttttttaggtggtatcgtttctttccaaccgaaggaatctaaagcaaatgggccaatttcaaacaatgtgtaactcattagcaatcacctcctttcgaaggcgtgctattattgcatgggtttatccctattttctgatataataaactgccattttttgttcctacaattttaaatggtaatcctggcgtgtacttaatccagtaagcaaaacgacgtcctacttcacgttgatcattcgtgctacaaaccacattatatttctttcttaattcaccataagtgaacgtacttccaactggttgttgaaaagatttagcaattataaaattataaagcttttcttgctgcttagatttcttattcattttaaaattcctccaataatttttaaggagtcaatcaatatcatataggttaaactatcttcaattgattgctataataagcataaatgaagcattatgattagacgcggaacaaaaaatggggagggggggtatatattgatacctacgctagaagaaattattgataagtatggaaacttagttgattatttgaaatttgatgtaacagttgaggtttatgaagatttgttgttattaagaagtttaagcgatttaaatgaacatcaaaagatggatagagtttcatttataaaaaaacatttaaactcaaatttcgattatttattagatgatactgagtttagaagtatcaataagatttacagtaatttaaatatcatgacgcatatcaatagtcaaaataataattttaaacgtaatccatttataaatgaagaacaattgaaatcactactcgcgataaagaaagtagatgcacatatgagttatgattcaaatattacttcaaaagcattggcagaaataaacaaaacgcaaaaaagattagttacaaagatagacacactctataatcagtcaaaaaaagaaaatgaatatgtacggttaggagaaaaaatatcgtatacaaaattggagaatcattggaaatatttatataatgagattcagttttataatcttaataatcaattgattagttatgttgcattagaacaggaatatgcttgggcttttttaaatgaactattttatttgatagaattgtatttgaaggcatttaaaggacaaaagaaaacagattatgagtttgggaaaaaattaaacgaatttattcaatcatatgtcattattttacttatagatatacgattacctgttgttagattatatattattagagacattgtagatacatgtgaaggagaaaaagataattacaaaagaattacactgatagaagaatctattaaaaagtatagatacgtaaaagatcagattaaaagatttaaaaatggattagaagaatcgttattaaatgcaactttatctattgaacaaaatatgttgaaagttaaaattgattattataaagcctactgctttcctagagaaaaaacaaagcataacaatattgagtacaatgtatcgttgttttttaaagcattagatgccttaaagaaatagtttttcactgaaaatatttatagatataattaaaattaattaatattaagccaggataatgtagtcttaatcgttctgaaatacgaaaaatgttgtggaaatcgcgtgaaataatcagaggaatcgtttgaaatcatcgtagtaatcgcgcgaaaatcacgtgaaataatcagaggaatcgtttgaaatcatcgtagtaatcgcgcgaaaatcacgtgaaataatcagaggaatcgtttgaaatcatcgtagtaatcgcgcgaaaatcacgtgaaataatcagaggaatcgtttgaaatcatcgtagtaatcgcgcgaaaatcacgtgaaataatcagaggaatcgtttgaaatcatcgtagtaatcgcgcgaaaatcacgtgaaataatcagaggaatcgtttgaaatcatcgtagtaatcgcgcgaaaatcacgtgaaataatcagaggaatcgtttgaaatcatcgtagtaatcgcgcgaaaatcgcgtgaaataatcagaggaatcgtttgaaatcatcgtagtaatcgcgcgaaaatcgcgtgaaataatcagaggaatcgtttgaaatcatcgtagtaatcgcgcgaaaatcgcgtgaaatactatggtagacggtttgagtaaattaatggagtattttaatatttatggtttggaggaattgcgttgcatagagaaagtaaatatatagagtataagaaatcacgaaaaggattatctaatgatatttggtctacgtatagtgcttttgcaaatactgaaggtggtactatatatttaggaattgaagaaaaaaagatcgaggacaaaaaagtctttgtttcagttggtgttgaagatccagagaaaatgattgaagatttttggaatgcactatatggaagaagtaaagttagtcaaaatattttatcaaataaagatgttaaaattgttaatattgaaaataaagcgtgcattgaaattcatgtaccagaagcgccttattcgaagaaaccgatatatgtagataataaaaaagatttagtatataaaagagttgatgatgctgatagaattgcgactgaagaagagtataaattcatgattgtaaattctcaagacgatatagatacagaattattagataactatgacatgtctgatttaaatcacgaatctatcgaaaattataggaaacttctattaaaaaatactaatgatgagagatatgcgaatatgagccaactggatttaatgatagatttaggagcatatagaaaagatagaagttcgaaagacaaacagtataaaatgactacagcatgtttattattctttggtaagtataatgcgattagtgatagattcccaggatttcaattagattattttaagaaaacaaattacctagatactgattggaaagatagaatatcaagtggagatttaggtaatgaagatttaaacgtgtatagtttttttgaaaaagtattgataaaattaactgataacattgaggaatcatttagcctaaatgatggtttgactagacaaaattatgcaagagatttaaaagtagcaattcgcgaagcactggttaatacattaatgcatgcgtattatgatactaagcaaagtattaaaatagttaattgtgaagattttatagagttttataatccgggtaatatgagaataaataaagaagattttattcatggagggcattcaaaggacagaaatagtatattatcgacgcttttcagaagagtaggatattcagaaaaagctggatctggaggaccaaggatattcgatgtagttaatagacataagcttaaaacgcctgaaatagaattaacggacatggacactaatgtagtactttggaaacaagatttaatgaaggagtttgaaaaatatcctgagttagacaaaaaagtaataaagtatattattgactatggatcaataagtaagggtgaagccttaaaaatggaaaatatgacagaatatcagtttagaaatattttaaaaaaactaaaagatgataacttgataaaaaaagaaggtgaaggtccggctactaaatatgtgttaatagaatcaaaagaagctgatatattgcgaactaaaaaagtaattaaaagtttagagtctttctttaggaataaataaaaaaacaagagataggtgcgaagtgtttggattatacaaatgcttcgcatcttatatttattaataaatatcatagaaaaccgtatcattaaccgatacgcagagatgcggttttttagacacttcataaagggattttgaacgtatcagaacatatgaggtttataggaattgctgttatgttttttgatcacatcaataaacaaaaaaggtatgtactatgtaaaatatttattaaatgatataaagcgagggtatataaatgatttttaaatagatatttatccaataatataaaaaggaactataagctatatctaaaagctatatctaactacttatagtccttcttcattagtataaatataattattaagaaaggtatatatctttgtaaccttcgtttacattaataatgttgtgataacctttgtgttctaaaataccaatagctatagaacttctaatgccagactgacagtctacataaataacatcgtttctattgaaaggtaaatctgtttctaaaagtttgccgtgtggcacatgaaccgcttgggataagtggccattattccattcattatcattacgtacatctaagacatgtgcttcattaccagttatgtctttactatgaacagattgtgtttgaatttgagcttgtggtaactgatatccagacacattatcatatccaataagttgtaaagtatgttatgtgttgcttttgaaacaaggtgatagtctccaatcaagttaatttcttgattatagtttagataccagccaatttgattgatgaaatttttatcatatggaatattgattgtaccttcaatatgtccaccatgataagcctccttactgcggagatcaaaagttaatctgtttgtacttgtagctggataaaccgtataaggttgatataaattcataccgaattgattaatttttttcatttgtgcaaaatgatgtggtggtgcaggttggtcagaaatgagtttatcgataaaggtagcttcattattttcagaaaaagcccagttcgtttgtttttcatagccaagcgtagatgttggaatagcacctaaagatttaccacaaggactaccagcgccatgaccaggccaaatttgaatgtagtctggcaagtctttaatactttcaatagatttaaacatttgttttgcgcctatttcagataatccttctactttaacagctttttctagtaaatcaggtctaccgatatctcctacaaaaataaaatcaccactgaatagtcccattggaacttgtgctccagcaccttcgtcagtaagtaaaaaacttatactttctggcgtgtgaccaggtgtatgaagcacttttaattttatatttcctacataaatatcatcattatgttgaacaaaatgagtgtggttaggcatatttttataacctaacatgtcatcactttcgcccgatacataaatactagcatttaactttatagcaacatctctaattcctgaaacaaaatttgcatgtatatgtgtttcagctgcatgagtaatggttaaactctcttcatcggcaactcgaatatatgaagataagtcacaaataggatcaatgatcatggcttctccagttttttgacaaccgattaaataagatgcttgagataaatgtttatcataaattgatgatagtcaatttgttatcaagggtgataattatattaactatggtaattacatggaattaaagttattaaacaaacttgatgatgaccaattagatttagaatttttacaagataatgggttaaaaggtaatgttcaaggtcctatgactttaaaggaacctttaaaaagttatatacaaaagtcttgaaaacgaatattttaaatttagataatgagttagaaaacactgaatatgtcgaaggtaaaccatatgtacagtacggtattaaatatgaaagaaatcaggcattaagaaatgaagctattaaaattcatggaactacatgtaaagtatgtggatttgattttaaagctaagtatggcgatttaggtgagggttttattgaaattcatcatttaaaaccaatgttttcaataaaaagagaaataaaagtaaatccacaaaaagatttagtcccactatgttctaattgccataaaatgattcatagaaatactaaaaaacctttaacgattaaagaattaaccaaaatagttaattataatagcaaataatttaatattttataaactatcattcaaccctcttaatttattaggaggttttttgtatttatgctttcaaatgtgtgatatactttgtttgttgaaatatagagtatctatagatagggtgattgagtatgaaattcactgaagtggaagttatcgaacatcttgtaaaggcatataaagaagcaggaaagcctacttatcctcatgaaaatttatatcgaggacgtaatcatagtatttcaggtattggagaagacttgctgggtgcttatttgattagtagattggaaggtgtccaaatatttattgatcagcctttatctatgattgataaatctttaagtacaagatatccggatttattaatttgtgaagataatgaaattaaaaatatactagaagttaaaatggacttaggatatcaaagaaaagattttatagattattgccgaaagaaagaagaatggatttcaaatatcgtaggaaaacagtgtgtattgtctagaaagagagaagacaaaattcctatgaatatagctgatgatattaaatttcatgttgtgatttacagtgaaaacaatggaccgaagcggtttgatgaagaaatcatgcctatcgttaatgaaacatgtccacatattgaagtatatgtcctaacaagcggtcaacaccctaatttagtaaatgttaatcttgaaggtattaatattaataaagatgaatttgaaatattagtaaatgcgttataaaaaaatagagcatcctccacgttatggaggtgctctgttttttattgaaaagtatcaagttaattaatttaatatgcttaataagttctaccttgacctttttctctagcttctgttcgatctcttatgtactcagtacatactggattttctgttaattcatcaactgtattagtttaatcagaagacgtgtctactttgtaagcttctaagaacttattatatgatatagcgtttgagttttgttgttcttctataaatttctgtagttatttttcaaaaaccgcatcattaactgataagcagaagcgtatcacaaataaaactaaaaaatagattgtgtataatataaaaggaagggatttatattaaaattttgaattcaaaaattattgaaagggaagctaccttagaaattgaatctatggccactaactgcttttttatatcaccacttattaaaaaatgtaagaatattcctcagtgctaagtgaaggaggttctagttttatttaatattcatattgataggtaatggttaataattgcctgtaaattattgttaaatatcgttgttatagtatcatcattcataaaatttttatagattttatcaagtatttcctcatcttcaatagctgtaaagcgatgtactagtctttttatgagctatatataattttgcgaagctaaactgtttgtaattattcaccaatcaggttatgtagtgtcacggttcataggtaattctctttttaaaatcatctaatattttatataattcatataagtgtagtattaacgttttctactttatctataaaatatttagaattacattagaattttaaattatacggctggaaattcaatgctgtaaaaatagacagattttaaaaaagtagtaataaaaagtctaagttttatctttgtaataaacttcgactatatttaaaaataaatatgaatgtcttttaatttctataatatcaaagctattatatgatttgaaattttgtaactttttctctaatttggaagtagataatgacttaaaggttttaacttttacccaacgacttggcattttatcactcctatgtaatgtattacttcaatatacccttaaatttttataattaattatattgtaatattattttattttataaaaatagtttaataaaatgtttaatttttataaaaaataattaaatattatagacattacgatagtttaattagaaaatatatttaagaattatgaatttagttcttattaatgttaaagatcatcaattattttgtcacattatcttgagaggattaccttatgaggtagccttttatttgtcacctaatattgctctaaggctaataatacatatataaaataaataattatcagaatatatttagaaattgatatttaataattaaataaaagtatgctaaatatttataatttacaagtgagctgatagaaagatgagtataagcgaatataaaaatagatacttagagtcactatataacacctttaaaactgagttagaaaacgaacgcactcgctattttatattagataccaactatacaaatagtgatgatactgaaaaggagtttacttgggatgtaaaacagaataataagatcagagaaggcgatttgttcatttttagacggccaactaatttatctcaaattgctcaacaattttatttctttggagctgggaaaatagaaaaaattgagcgaaaaaataatgtagcaaccgcttacatttcaaaacccttactttttgtggatcgtgttttaaaagataatattgaaaatttaaaatgggagttcaaagaaagaattaaagaagagtgggagcagtttttctttaaaaataaaatcagtaatattacaaaaaatgattttttaaaactactaagtttgagtagaaatgtagtggaaatagaaagtaattatattaataatgatatttcgctaacttttaaacaaatggctgatatggcaactcgaataaagaaaaatatttactacgtagggaatcatgaagcatttgttcaagctaagggaagtgctcattttgagttttcaaaaaggattaaacaaaattatagttatagatgtgcaattaccgggattaaaactaaagactttttagtcgttacacatattattccttggcatgaaaatgagtttattagactagatccttcaaatggtatttgtttgtctttatttttagcaaaagcatttaagaaaggctttatcactttttctaacagttatagagttgttttatctaaagaagcagagaaagatgctgctttatatgaagaattaaagatttatgaaaatcaaaaaatcgaactaccagattgtcagaaacctaatttgaaatatttagattggcatagagaacatatttttaaaaattaattttgggagaggttgtatgacagatattagtcaattagtagaggtgccatacatctttcattagtagattgaaaaagagcacttgaaacagataatttgtattatttagcctatggattaacaactttagataattgttttaaatattaccaattaattacacaaaatgaacatttttgctattctcaacaagaagaaagagaaagttatcagcaaaaatttcaaagtatgattaatggtttaaaaattaaaattggcatacaaagttcaaatgatgatgcgcaataagctacaaagtttgattttttaattgaacgttatatgtttttaaaagaagaaagagcttcgaattaatatcttaatggaggaagattagtaaatggctagaacgtataatgtgattaaatatgtcattaagaaaaataaggatgatcttaaaatacatggattaagattatatgaatttaatataaaagatgaaaaagctataaatattagccaacccatttttgtgaacagagcaacattgattgagaaaatacaaaatggtgaagcatttacgcacgcctttagagtaaatcacaatacttattatgcaggccaattaatttctttatcattgaataaaaatggttatattaataacaactttgaggcctcacgagatattattagaaacattgaagtaagtattttagactatgaataaaggtaatactgatagaatacattacaattaaaaaagggagtataggactcccttaataagttgatatataagtgacttatttttttaatagaattttaattcctctgttaatgttcaagatatataatattaaagcaattaaaaagaatataatagtaataattaaaagaatgctaaatattaataattgatgatccaaaggtttatcaaagacttctttagaaaaaataaatgccaatctacctataaaaaaactaacccaagtcataatatgattaatgaatgcttttttgccatgttctgatgttggttcatcagcaagtatccatacaaataaaggtaaaatgacaggtgcgaaaaagatacttaaataactcaatgctgataaaacgtaactattgtcatttttatgcatattactatttgtattttccacttttttcaccttctttacttttctttactattataaaaacattaatagcgagctattacaacagttataagagaagcttacgatattgtaagtatgtgttgttataatcaatataaaattaagaaagacctgagaatttatattatcatccacaatcgaagtgagtagcgaaatttattggaaaaggtacttatattgaagatattgttaatggttcatttttaaaaagccaagacgatttgaagttaaaagcttctgacttcactgtcgaagataactataactacggtgtacttatatttccagagaatctttctcttacagataataataagaaattggaatctttaataaaaactatactatttacaggtaaacgatatcaatatacttattttaaaatttgatcttaatagataaggatataatgatttaaacaatttaagagatattattttcacaaaaaaagaatgctttttgttagaggcactgaacccttaaaatgggaacttaataaaaacactatgttctaggctgctaattctctgtattttacaggggataagtagcctagtttttgttgaattcgattattattatagtttttaatgtattttcgacaatatctattacaatatgattagagttattaagctgattattgatgtaaaaagtttcagactttagcgaggaatggaaactttctatcggggcgttatcggcaggtgttccctttcgggacatacttctgataatgcctttttcttcgcataattgataataagcataagatgtataaacgctgccttgatcactatgtaatatacacccctcaggtatatcgatttgatttaatgtatcattaactaaacgttggtcttgtttatcatctattttatacgccacaatttctccgttataaatgtccattatcgaagataaatacaacatagaatgaccaaatggtaaataagtaatatcggttgttaatacttccatgggacaactcgctttaaattgtctttgtaataaattgtccgttttataatacggtttacctattcttgtcgtctttttaggtctaactcggcagttcaaatgatgcttctgcatcactctctgtactctcttatgattaattggtgatgtataacattgattaatcaatgctgtaatcttacgataaccgtaggtatattgtttaccaacatgttgtgaaaatctataactttccccatttcgataccatcgccaccaatttttcacttgtgttctatttctaatatttaattctttcataatttcttttgttggaaatcctgctgctttcatttcaactgctttatactttgtttctactgaataagaagctcttttcatagaaaaaaaacacctccgtatgattcattttaatatgaattcaacgaaagtgtttttatataattcccactattggggtcagtctaaaattaaaattgataacttttttaataaaatagatacactaattttaaaacaaggtaaaaaaatagaattattaaaacaacgcaaacaaggcttactacaaaaaatgtttgtgtaattctgataacgtcctattatgttaattgaaaatagacaaaaataaattgagagcatcccttaccgcaaagtgaaggatgctctatttttgttgaaattaatataagcttcattctgatagatagtcattaataattgtttgcaaatcgttattaagtaccgttgttacagcgtcatcattcataaaatcctcgtagattttatcaagaatttattcctcttacagacattcgcgagaagtccgttttaattttattagaagtaattcaggtttgaacctacctaaatgaatatatgagttatcttttatactacaaaatatattcagatttcaataatgacataaaataggcatctttatatttacctttagtgtagaattgctctttaagtaatccttctgttttaaatccttgtgactcgtatatatgaatagcttttttgttatctgcatcaacatatagatagatcttgtgcatatttaaaatattgaatgcataaattatcgctttttcgaatgcgaattttgcataacctttaccactgaactcaggtttaataattatttgtatttcacaattacgatggatgtaattaatttctactaattcaacaatacctacgacttgattttcatcttcaacaataaaacgtctttccgattcatctaataaatgcttatcaaataaatgttgaagttccgttaaggattcataaggctcttcaaaccaataagacataatagaatattcattatttaattcatgaacaaaaagtaaatcactatactctaatgctcttagtttcataatcccactcccaaaattttcttatatatttgcattataaatataaataacgaataagtcattattcactatgaataaatctattttaacaattcactacatactaattctcattttcttattattctctaatatctctgatttattactcagtgaaagatgccctatttttatcagtatatagtttttattttgatagatattgattaataatcgtctgtaaatcattgttaagtaaggttgtgatagcgtcgttattcataaaatcttcataaattttatcaagtatttctttaatatattttttaatcttcacaccttaaattcacttgaaaaccaaatcacttctaaattatgattttacataataaatttttaaaaattggtattatataaaataatctcaataatcagaattttttgtaaataataatattaaagtgtaaaataacagataagaatagacttaatgtatataaattaaaggagtgttggaagtgaaaactagagcagcagttttacatgaaatgggggctaaaaagccctataaagaatctaaacctttaaaaattgaatacttagaacttgataatcctagcgaacacgaagtattaattaaaattcatgcagctggattatgtcactctgatttgtcagtaattaatggtaacagacctagacctttacctatggcacttggtcatgaagcttccggtgaagtaattaaagttggaaaagctgttacaagagttagcgaaggagatcatgtggtatgcacatttattcccagttgtggaaaatgtatcccatgtaaagaaggacgtcctgcattatgtgaaaacggagcaatatctaatgaaaaaggcgaaatgttagagggagggatgcgtttatctaatgatgaaggaaaagtatatcatcacttggggatatcaggttttgctgaatattctgttgtctctgaaaactctatagttaaaattgataaaaaaataccttttgaacgtgcagctgcatttggttgtgctattatcacaggtatcggtgctgtggtgaatacagcccaaattcgttctggtagtaatgtagcggttgttggtttaggaggtattggattgaatgctattattggagctaaactagcgggagccaatgaaattattgctttagatattaacgaagataaatttgaattagcaaagcaatttggggctacagcaacatttaattcaagcgataaagatatcgatgagcaaattaaagaatatattcctggcggagtagaatatgcttttgaaacagcgggtgtagtgccagctatgaaagttgcttatcagattactaaacgaggggggacaactgtaacaacaggactgcctaatcctaaagataatttttctttccctcaagttactttagcggctgaagaacgtaccattaaaggatcatatgtaggaagttgtgtacctgacagagatataccaaggttcgttaatctatacaaccaaggacgtttaaatattgattcactcatcagtgaggttatcactttagatgaaattaatgagggatttgatcgtttgtctaatggtgaagtaggtagaattataatgaagatgcattgaatataatagaattcaagtcgttcctcctcttgatttctatgaaaagaataacaatttgagtaggaagattactgacaaatattacatttgcattgtgactgccaatctaattgtatttttacatttcatatctatatattagaagataaatgttttaaaactaattactaatagtttttttagataaaaaaagatataggagcatccttcaccgcaaaagtgaaggatgctctagttttattagaatatagttttcattttgatagataatgattaataattgtttgtaaatcattgttaagtaccgttgtaatagagtcatcatttataaactcttcatagattttatcaagtatttcctcgtcatcgatggctgtgaaatgatgcaccagaccttttactattgaaatgtaattttgtgatgctaaacaactagcaaccgttcgccaattggattgtatagtgttgtcatggttcatagataatactcctttactttagtgtccatttttgacgtgctttagggttgagtggatgcataacttcgttcgttactggatttatgagcttttttactttctttttatgaggttttaacatttccatcacttgttcgacacggtcgataacaactggtcgcttcgcataggcaccataagcaagaatgactgtgtcactttcactaattgctttcattaagtgtatatctgtgtgctcatcataaggctctttgatatgtttaaggttctctggtgttttaatattagagaaaagattaacgagataaacagcgccatattgctcagaattagctaattgattgaggatgagaaccgtagtaagatcgagtgataatacaccatctaaatgaagatacatcgttatcacagtacaagccggtttcttgtcatcccatatctttttgagtaagtagcgatgttgttcatcatcgctaaatatcgcttctgtgtgtatcgtacttttgattgtattcatatatcgtcacttcctttagtattcttctggcaaaagcatcacataataaaaagcgtctacatcatcttctcggatgacgtagactttcttaggtaatgcattttgattttttatatagtttgtatagtgatattccaatttgtatgcgggttgttcttgttcatgtgtaattgacaacatattatcatcttcttgtagtttgaaaatgtgtaggtaatctgtattaagttgattgtctcgatcttttaccatgttccaaagtaagatttgaaggtctagagatagttgttcactaatgcctcttgtgatgtatcgattgattttcatactattttcctccattttgcttttctttcatgatgtcaatcacttcgttaatgactgtaacagatatttgtgccactttgatccaattattcatggttattccctccttcttttagtaaatgacgttcatcgataatcgtatttttagtatctgtgaggtatagaaagtccatatcaaaatgatccagataaccaatactgatgagttggttattagaatacattagaaatggatagatacttagttcatgtagctcattattatagtaggtataagtttcaagtataagatgtgcaagtggggaatcattaataaaacgtttgggtagaatattttctgccgcttcctccagtgtttcacattcccatgtttcattgttagataattggaataagcgagtcatatattgtttgagttcttgagtagttgttttcatatcattgcctccctagatagtgtgatagtgatgtacttcatatacatcattgagataatatatatttgatttgtcatttattactgatcccgttgacaatatgagaaaattccatataaaaaaccgctacaaaccttggtatgacaaggaaatcccgaaattccgcctattttgacgaacaatcaactcattatttataagtattgatgatagggtggggtctctgcttccttatatatattatttatttataaagaataacgggattttgggattgtgcttgcacaatccttctgcttcttctaatctgcaaatcccattcctttcccgataaaaaatcatcgtgggatgttctttagcaatttcaatataagcctcgtgtagttatgaaaaaattacgacaatgactgtttcattagataagtgttattgaaattgataaagagaattctcaaaaatttttagaaaaagaaagaggaagtatgtagatataaaatagatttattaaatagtaaggtataatgtttgcggtaaaaataaagacgaagtgctggaatacacttcgtcgataataaggtagttgaagtttcgattattttaaattgatcattttaagcctacaaatccctctaatgtttcaccagatttgtacacttttgtcgccttctttttcctaaataacgtaaatgccaaggttcatattgatatcctgtgatgctttctttgtttttaggatatcttataataaatccataattatgggcattcttagctatccagcgtccttcctcagttttaccaaaactagcatatagattttcacaacaagttggtaaacaatatacctacggtaaaggattagaagagctgtcagaagtagaacaattaaaattagaaaataagagaaaagatatagaattggatattttaaaaaagtacaaggtattggaaaggaagtggtaccaacagtagtcatagatttagtggatcaattaaaagtaaaatattcaatcaaattgctactaaaagtattaaacatacctaaatcaacatattaccgatggaaaaacaaaacccataaaaatgataccgtaacacaaaaagttattgaattatgtaaagctaaccactatacctacggttatcgtaagattacagcattgattaatcaatgttatacatcaccaattaatcataagagagtacagagaatgatgcagaagcatcatttgaactgccgagttagacctaaaaagatgacaaaaataggtaaaccgtattataaaacggacaatttattacaaagacaatttaaagcgagttgtccaatggaagtattaacaaccgatattacttatttaccatttggtcattctatgttgtatttatcttcgataatggatatttataacggagaaattgtggcgtataaaatagatgataaacaagaccaaagtttagttaatgatacattaaatcaaatcgatatacctgagggttgtatattacatagtgatcaaggcagcgtttatacatcttatgcttattatcaattgtgcgaagaaaaaggcattatcagaagtatgtcccgaaagggaacacctgccgataacgccccgatagaaagtttccattcctcgctaaagtctgaaactttttacatcaataatgagcttaatcactctaatcacattgtaatagatattgtcgaaaagtacattaaaaacaataataataataataataatcgaattcaacaaaaactaggctacttatcccctgtaaaatacagagaattaatagcctagaacatggtgtttttattaagttcccgttttaagggttcagtgccctaggattataggctcttttgtttataaaggtaattgaactaaagtattataatttcaattcttaattaatgttcctattttaccgtctaaagcgtcccctaatcctgctagagatgtaatcaaaacactgcctttagtatttttttcaagaaattgaagtgcagcttcaacttttggaagcatacttcctttagcaaattgaccatcagagatatgttttttcatttcatccacagacacttcatcgagacctctttggttttcttttccatagttaatgtaaacatggtccacagcagttaatatgattaattgatcagattgtaaatgtgctgctaataaagcactcgttttatctttatcaataactgcatcaacacctgtataaacttcattttccttaattactggaattccaccaccgccggcagcgataactagtgttccatgagtgattaatgtttctatactatctaactcaactatacttataggttgtggggaagggacaacgcgacgatagccgcgtccagaatcttctacaaaagtataacctttttctttcgtaaatttatcagcctgctcttttgtataaaataatccaattggtttagtagggttattgaaagcagaatcatcgcttgcaacttgaacttgtgttactagcgtaacaacttgtttatctatgcccattgaatgaagttcgttttgtaaactttcttgcatctgatagccaatataagcttgactcatagcaccacattcagggaaaggaaaaggaggaccttgtttgtgttccgccgcataatttaaacctaagttaatacttccaacttgtggaccattaccatgactaattacaatttcgtatcctttatcgattaaacttactagagatttagatgtactttttaataaatctaattgttctttaggcgattgtcctaaagcgttaccacccaaagctacgacgattttagacatatttatatcctcctttcatttactctcctaatgttgctaccatgactgcttttattgtatgtgctctattttctgcttcttggaaaacaactgattgttcactttcaaatacttcatttgttacttccatttcagttagaccatatttttcttgaatttgtttaccgattattgtttcagtatcatggaatgatggtaagcaatgttcaaaaattgtatgtggattacctgtttttttcattaattctttagttacacggtatggttctaataatttgatacgtttttcccaaacttcatcaggttcacccatagatacccaaacatctgtgtaaattacatcagatcctttgacaccttcatcaatatcatcagttataaggatttcaccaccgtttttgtcagctatatcattacaccgatttaataattcatcagttggatttagttctttaggacatacaagatggaaagtcatgcccatgattgctgctccttgcattaaggcatttgcaacgttattacgtccatctccaacatatgtgaagttaatttcattatatggttttttcaatacttctttagctgttaaaaaatcagcaagtacttgtgtaggatgatcttcatctgttaaaccattccatacgggaacgccagaatattttgccaaatcctcaactactctttgtgagaatccacgatattctatgccatcatacattccacctaaaacacgagcagtatctttggtagactcttttttacccatttgagaacctgttggcccaaggtatgttacatgtgcaccttgatcataagccgctgtttcaaatgcacatcgagtgcgtgttgaatctttttcaaaaagtagagcgatatttttacctttcattttttgttgttctattcctgcatattttgcgcgtttaagatcttcagataaattaagtaaaaattccatttctttttgtgtgaagtctaacaaagttaaaaagtttctatttcttaaatttttcattttgaatatctccttttcaattaatattttattcatgttatttttttataatccaatttcttttatcttgatatataatattttctatttttaattctctgattatttcaccagtagtttttctgttaagtccagataaattacttattaattgaacagtcataatttgttttaattcatagaattctccattatcatccccaattgaaaggcataaaatttgtagtattctttcaattctttctttagctgaattagctcttaacgccataatatattctacttgaaattgaatagtctcattaagtttcttgaagagactttcaaatatttcattatgctttctacataaatactcaagtaaatctttcggtaaagttaatattttacaatctgtcaaagctgtacatatttcatatggtgcaggggtttcattaaatatgaagttcattggaaatatattttcgtctttacttaatcttaaataattgtcaccagtaatattagaagattcatgtaaaatacaaccatttactaaaaagtatacaaattttatttgatcagttgaatgatatatgacttgtccttttttatattgataaagtgttaaatcctctttataaggtctaacaatactaacaggaatatttaagtatgatgctaattgtttaagattattatcaaattcatattctgaatttttaatataaatattttcttcatacataactataaaccccttaaaaattacttagtttaaatcataacttaaaatacagaaatattacctgtaatcaaacgaactattcctattattgcaagtacaatgatgaatatgaataacgtataatccaattttgtcaaatgtttgttattatccctttgtacgtagctgtatacgagtaatccaggtatatataacaacatcgttaatagtaaataatctaatccagctgcataaaccaaccaaattgtgtaaatagatgcaataattcctattatccattgttttaaattagctttagatttattttgaatagtatatttaacctggtaaaaagcactgagtgtatatggaattaagattgcacttgatgcaagtgaaaacgcaaactgataggcactatctgtaaacaacatactaattaaaaataactgaactaatatattagtaataattaaagcgttgaccggagctttattcttattttctttagcaaaccatttcgggaaaagtccatctttagctacaatgaatggtaattcaccagctagtaatgtccatcctaaccaagctcctaaaacagagataattaagcctatattaactaacactgaaccccaatgacctacaatatgttctaatacttgtgccattgatggattagcaagttttgaaatttggttctgctgaatgacaccttgggctagtacagtcattaagaaataaatgactagcacagaaatcaaaccaataacggtagcagttcctacatcctttttagactttgcacgtccagaaaagacaacggctccttcaatccctgtgaatacccatacagttactaacatagtactttttacttgtgccattgtatctccccaactaaaaacgccaacacttccactagtcataccataaaaaccggatttaaaagtactgaagttgaatacaactatcatgcatataataactagaaatataggtattaatttagctactgtaacaatactatttataaacgctgcagtttctacacctctaagtattaaaaaatgtacaccccataataaaattgatgctatgataatacttggaagtgtgttacctcctttaaatatagggaaaaagttacccacagctgacattaatagggttgcataagccacattacctagaaatgctgcaaaccaatatccccaagcacttgaaaaaccaataaaatctccaaaccctgtttgagcataactataaattcctccatcaagatctggtcgctcatttgttaaattttgaaatacgaaagcaagagaaatcataccaatagcagttattatccaaccgataattattgcaagtccaccagcttggccacccatatctgagatgatattgaatgcaccaccgcctatcatagagcctatgactaaaccaattaaggaagttttacctaatttattttcatccatattaatctcccctaataaaggtggtaaaaatcttgttatttgatttaatgaatgaattacttgtgacttttaccacctttcaaatttaaatatcttctctaaataacggctgactcatacatcttgggcctccgcgtccacgtacaagttcactaccagtaatttcaatcactttaattcctttgtcgcgtaaaagttggtttgatacatagttgcgatcgtatgtcaccacaacccctggtcgaatacataatgtgtttgagccatcattccattgttcacgtgcaccatcaataacgtcgccattacctgttggaataaagtccactttttctacttctaaaacttcagcaagtgtttcacgtaacttgctagaacgagtaatttttatatcgtccttaccatcattttgttctatggtaaatatattcatattattttcttctttaaatattgctgcatgtactgtaaacttatcgtagtcaatcatagttagtactgtatctaggtgcataaatgtacgtgtattaggtatttcaatagctacgatttttttaaaacttgtgtttgcatctttgaaaatattacgtgctaacttttctattgcttgagctgatgtacgttctgatataccaatagctaaaacatctttcgataatactaattcatctccaccttcaatattaaatggtgagttacgatctaaccatactggtacatctttatctttaaatcttggatgatgtttcagtatatatgtcataaaaatagattctctacgtcgtgctctccaatacattctgttaattgtcattcctctaccaattgaagcttggggatctcttgtaaaataaaggttgggcattggatctaagtaaaatggatatctatcatccatatattctactaaatgggttgtttcaagttgaatttcttctttacgtacgccagccatgattttatttacaagttcttggtcagataactttgaaaagaattctttaatttcagtttcatgacctaatattgtctttttagattctgttaatatgtcgtttatgaagttctcgcgtacttctggctcagtaatagattctgctgcaagtttttctaaataaactacttcgattccttcatctctcaaagtttgagcaaatttgtcatgctcttcttgtgcaacttttaagtagggaatatcatcgaataataaaccacttaaatgatcaggtactaaattttctaattcttttcctggtctttttaacaacacagttttcaatttgcctatttcactatttacttgaatgggtccttgtaccatttcaaattcctcctttgctttattacattcacattataaaacgctttcaaaaaacatcgtgtgatttaattcacaattgtttagggagggttttcacatatatagatttattcaatgcaaaattttgtatgaatatgtattttgtactatataatagtgaataatttgaaaaatctcattgttaaaaccttatcttattcaagcaaaaagattttttactcatttttttgtattagtaatcattcctattaatataatcatttaatttttaagggaataattgataacaaacaaattctgctatttcatttgaagaagtcaaaatcatcaaagtatcgttacctccaataattcctaatatttctttcatttgtaattgatctatgtaataacttatactttgagcaaagccaggagatgtttttattaagacatagttatttagcgttataaattcaataatctcatcactaaatatttctaattgtttttttgcacttaattgatttgtttgatttattttcttgtaaatatactttttattttcaacagggattttgtaaatttctaattcttgtaagtcacgagaaatagttgtcaagctatagtaaactccaaaatgtcttgccatgtaatccactatttgttgttttttattaaactgattctgttgtataacagttaagataagatttaaacgtttttcttttttcatttttattaccccctttattatttttgattatgaaatagattttaaataactgtataaaaatcacttataaatctcaatttacaaataattttgaaatagtggatgctttaattataagtagattattttatgcctaaaaggagagattaattagaatagattatagtcatcataattataaaatcaaaataatttgcgtaataatagcgaaatgtgtaaattgtaaatgtcaggtaataaccacaatatctcataaaagaagtttggaaaaaggcattgaaataaaaagtagtttataagttgaagatatttaggtatgtattagagcgctttataaataaataggtttatacaaagaattacaaaaataatataaaaaatagaatctaatacatgataaggaatatatttgaataatttgaatatgagaataagcatacatatttagggtatatataagtaatagacatctaaataataagtaataggaggctggtgtagatgttcaaaaatatattattaccctatgatttcgaaaatgattttagtgctatccctgactatttagaaaaagtcaccgatgaagattcagttgttgtaatttatcacgttgtaacagaaaatgatcttgcaattagtgtcaagtattataataagcataaagaagatattattagagaaaaagagaaaaaactcactccatttttacgtgaattagaaaaaagagatattcaatataaaatagatgtagattttgggcatattaaagatacaatcttagaaaaaattacttctggagatataaataatggtgaatttgatttagtaattatgagtaatcatagagtcgatttgaatattaaacatgttttaggagatgttacacataagattgctaaaagaagttctgtcccagtactaattgttaaataaacataagaagtaagaaatttattaattcaaaaagcctaaatactttctcacaaatcgagagagtatttaggcttttttatttttttaataaacgtaatgaatttaatataactaatattgctgcacctgtatcacttagaacagctaaccaaagtgttagtaatccagggaatactaacacaaaggcaattaatttaataattatagcaaaatataggttctgttgcaaagttgaatctatagtataattttaacaaaaaggagtcttctgtatgaactatttcagatataaacaatttaacaaggatgttatcactgtagccgttggctactatctaagatatgcattgagttatcgtgatatatctgaaatattaagggaacgtggtgtaaacgttcatcattcaacggtctaccgttgggttcaagaatatgccccaattttatatcaaatttggaagaaaaagcataaaaagctaattacaaatggcgtattgatgagacgtacatcaaaataaaaggaaaatggagctatttatatcgtgccattgatgcagagggatatacattagatatttggttgcgtaagcaacgagataatcattcagcatatgcgtttatcaaacgtctcattaaacaatttggtaaacctcaaaaggtaattacagatcaggcaccttcaacgaaggtagcaatggctaaagtaattaaagcttttaaacttaaacctgactgttattgtacatcgaaatatctgaataacctcattgagcaagatcactgtcatattaaaataagaaagacaaggtatcaaaatatcaatacagcaaagaatactttaaaaggtattgaatgtatttacgctctatataaaaagaaccgcaggtctcttcagatctacggattttcgccatgccacgaaattagcatcatgctagcaagttaagcgaacactgacatgataaattagtggttagctatatttttttactttgcaacagaacctataaaaaacatgggcttaaagggttaatttatatagtattactgcaaacattgatttgggtcaaaaattaggggtattaaaaaaatgaatgaatcataattttatcaagctgattggagaggttaaaatgcattatataaaatttattgagtcaaaagataatacaaaactttatatgaaagtgaatgatattcaagatgcaaaagcgaatatcattatagctcatggtgtggcagaacatttagatcgttatgatgagataacagcatatttaaatgaagcgggttttagtgttattagatatgatcaaagagggcatggtcgttctgaaggcaagcgtgccttttatagcaatagtaatgaaattgtcgaagatttagatgcgataataaattatgtgaagtcaaactttgaaggtaaagtttacttaatcggtcatagtatgggtggttatacagtcactttatatggaacgaaacatccaaatacagtgaatggtattataacttctggagcattaacacgttataataataaactatttggcaatcctgatagaaacatatcacctgatacttatatagaaaacaatttaagtgagggggtatgttctgatttagaggtaatggaaaaatataaacttgatgatttgaatgcgaaacaaatctctatggggctcgtcttttcaataatggatggtgttaggtatttgaaagacaatgctcaacaatttacagataatattttgatattgcatggcaaggaagatgggctagtaagctatgtagattctttacagctttatcaagaaataggatcagcacataaatcattacacatctatgatcgtttggagcatgaaatatttaatgaaagttcttataatagaactatttttaacgaagttattgaatggcttgaaacggaattaacttataactaaaacagtatagttccgtgtatttgattataagaaattatgaggatattaaacatactaagattagctatgaagaaatctatgacgatagattttttcatagctattttttatagttatagagaggagtagactgtccagactcttggattttaaatccgtaaaaaaaacaagtcagctttactctcaccttttgaaattcgtttgtagtatgttgggttcttgaaaccgtgtataggaaaatgaaatgagaaaggttaagtaaagtttttagcttctcaactattcaaaggaggtttttttatcgattacttaggtgttgatattagtaaaaggagtagtgtagttgcacattataaaaatggaaaattccaaaaagagtttttcatccaaaataataaaaatggctacaattatttactcaagtatttgaatgacttagaccacccacaactcatttttgaatctacaggtatctattcaagaggtatggaacgattttgttgtgtaaatcaaattaactatattcaaatgaatccgttagaagccaaatttaaaacgagcgctctaagatcatggaaaactgatcaggcagatgctcataagcttgcttgtttaggaccgacgctcaaacaaacaggcagcttacctatacatgagttaatattctttgaattaagagaacgtgcccgttttcatctagaaatcgagaatgaacaaaatcgacttaaatttcagattcttgaattactccatcaaacattccctggtttagaaagattatttagtagtcgatattcaatcattgcactcaacatcgcagaaatttttactcatccagacgtggttcttgatatcgacaaggatgtacttattacacatatattcaattctacagataagggaatgtcaatggataaagctacaaaatatgcacttcaattaagagtgattgctcaagaaagctatcctaatgtcgatagacattcctttctagtcgaaaaattacgcttacttattcaacaattaaaacaatctattcatcatctcaaacaattagatgatgccatgattcaattagcacaacaactcgattattttgaaaatattcattcgatacctggtattggtaagctaagcacagctatgattattggggagattggtgatattaagcgatttaaatcaaataaacaactcaacgcttttgtaggcattgatatcaaacgatatcaatcaggtcatacacactgtagagataccatcaacaagcgtggtaataaaaaagcgagaaaacttttattttgggtgattatgaatataataagagggcagcatcattatgacaatcatgtcgtcgattattactacaaactaagaaagcagcctaatgagaaacctcataagactgccatcattgcttgtataaatcgattattaaaaacgattcattatctggtaatgaatcataaattgtacgattatcaaatgtcaccacattagccaaacgtacaattaaatatattttaataccttattcaaaaaattaaaatgaacggtttagttaagtaatgcttattttaattataagtacttgactaatcgtaagaaagagcctaggacataaatcaatgtctcgcgaccacagcttaatttttggtgttcattcatgactttaaaaaatccttattgcataaatgtacatagtgtagtactattcaaaacgtaattattacgatttgaattaagcgaggagaatgaaatgactaagacttatgacgtttggtggcaaaaaggtcaagaatcagatgatgatatggcacgagaccatcaagaagcttgggagagaacaataaaaatgcttgatacatctgacatcgaagggaaaacgattttagatgtgggatgtaatcaaggcggatttttacgacagttatacgatacaacaccgtttaaaaaaggtgttggcatagatttagcacgtttatctttggaaaaggcagagacattaaaaggacaacgtccacttacatactatttaacagataaaccgcaagaaacgaagcacgtgtttgatacggcagtaagtacgtctgtcttgtacttaatagaagatattccgcaacatgcaaaagatttaaaagaggtattgaaaccaggcggtgtttattacgcttcattcgcggatttaactaataacccaagtcgtcagtttatggatgacacgattaatcaatatggtgcaacaccttctcagaatcactctctaaaacatatcgttgatagctttgtggatgcaggatttgaagttgcagtaatgaaagagcatgtacctgacgtgattgatttaacacattatagcgatttttatttatcaccgaatgattatttacaaacactatatgaagaatcgtttttaataaaagcaagtgtgaaagaaggtactgagaaatgaggaaatgtgtattaatgacggtagcagcaagtgctacgctcttattggcaggttgtggcaatggtcaaaaagaagataaagatgttacggtatcgctacctactgaagcaaaggcggataaacttgacgcgcaaggctatgatgcagcgatgcccgtttatagtgcagtgtatgatgcattagttaaatatgataaagataagggtattaaagcaggtttagcagataaatggagcgttgatgaatcagggaaagtttatgaattccatttgaaaaagaatgttaaattctcagatggttcagcattagatgctaaggacgtgaaattctcgattgatcgtgcgaaagcgatgaacaaagattcgactgtagaaacgttaaaaaaattagataaggtcgttgttaaaaatgagcacgtggtccaaattagattgaaatctccttcaaatcaagtgttaaatgaattaacacaagtgagaccgttgcgtattatgagtccacattcagtagaagatggtaaagtaaacggtaaatttgaaaaagcgattggaacaggtgcatttgttgttgataaaactggtaaagaaaaaacgacaatgaagccaaataaatattttgacaacggtcacccagtcaattatcatcttgcattccaaacgattgaagatggggactcaagaaattctgcagtacaaagtggttctgtagatatttctggtggtgctttaggtatgctctcagacgaacaaatcaaacaagataagaaaaataagaacttaacgattgaagatagacctagcacagtaagtcactttatggcatttaaccctaaaaatgatgtattaaatcaacgcacaattcgtgaagcgataagtaagagcatcgatgcgaaagacattgcgggcaaatctgtaaatggtctgttccagaagaacgtacaatttgtgactaaaaataatcaacagccacacgattatgatatgaaagcggctgaaaggttacttaaatcagaaggatatcataaaaacgatgacggcatctttgaaaagaatggcaaacctttatcatttaacttagtcattcaaactgcagagttcccaaattggaaagataaagctgaaaaagtgcaacgtcagcttaaacaagccggtattaagttaaatgtgaaaacgttagattcacaatcatactatgatacattatggacgaaaaaagactatgatttgattttctatagaacgtattcagatgcattaatgccttacaactttataagttcagtgtttaaaaataatgatggtcaaccaggggtgttagctgatgatgaaacattaacgaaacagctagacgatttcccatcaaccgtatcaaaagaagaccaacagtgttcatttgatgacatatttaaacactttaatcaacaatactatggtgtgccaattgcttatccaaatgagacgtttgtagtgagtgataaagtaaaacaattcaaattctctggacttacggatgcaccaattgattataaagcgttgaaagttaatgaatagcaatgctcaaacgtacaattaaattcatactttatttaatcgtaagttcgtttattatcttcattttagttgagaagacatctggtaatccagcgattctgtatctacaacgtcatggttatacgtcgattacgcaagacaatattgaagcggcacaacatcaacttggcttaggacaacatgtgttactaagatatatcgattgggttggacatgcactcacgggcaacttaggatacggctttagtacgaacgaagcagttaccgctatgataatggaagccatcgtgccgacgcttgtgctaatcattgtctctagttgtatcatgttgccatttggctatattgttggttacttcgttgggacgcgtccgcatacacgttacgctaatggaattcgtggattcgcccaagtgatgacctcaatgccagaatactggttagctattttattcatttattatttaggcgtacgttggcaattgttaccatttgtaggtagtgattcatggcaacactttgtgctgccaatcttcacaattgttgttatagaagggtgtcatatcttattgatgacagcacatctgattacacaaacgttagatcaagatgcgtatcaactggcgcagttaagacatttttcgttaaaagcgcgtatcatcgtacaaattaaagagatatttgcaccactaatgacgatttcaattaacagtatcattcatttaattggaaaagccgtaatactagaagtcatcttcagcatgtctggtataggtaaattgttgattaatgctattaaccaacgagattatccactgattcagggcattgtcatctttatcattgtctttattatgctaatgaattatttaggcgatgtgattattttgaagaatgaacctagacttcgacgacgtcatacccagcagtcaggcaatgagaaaagaggtacgatgtgatgaaaaaatatcaaacgtacatcgcaataggttcactattgagtttgatggttgtattaattacgtatggtttaatgcaagacacgcaacatttgaacccacttgagtcacctaatggacaacattggttgggtaccgatcaattaggcagagacttcttagtaagactgattgtcggtagtcttgtcacattgagtttaacaggcatagtgattctattaagcgtttgtatgggacttatctttggcttaattgcaggcatagaaagacgatggttagatcaaatcatcatgtttgttgccgatatgttgctggctattccgtcatttattatcgcattagtcatcttaagtttagtaagtaactccatgataggtttgatacttgctttaacgattggatggataggacgttatttacgttacttcagaaatttaacgcgagatattcaaaaacgtccatttgttcaatatgcacgattgagtgggaactcaacattcaaaacgacagtaacacatgtgattccacatttattaagtagtatattcgctttggtaacggctgactttggcaaaatgatgctcagcatatctggacttgcttttctaggactaggtattaaaccgccgacgcctgagttaggaacaattctttttgatgggaaaagttatttcaacggcgcaccgtggctcttcttcttccctggtgtattgttaggaggtttcgccttattatgtcaaattatcaacaaaaaaataacgcagtaaatacggtagtcaacgtcaatcaattatcgattttagatcaagagaaagtattgttaaaggatgttgatttgacagtaactaaaggtgcatttcattgcattataggtgaaagtggcagtgggaaatcactgttaacaagaacaatacttggaatgaaacaatcacaattatgttatcaaggagatattgacatcgatttaactcaaacagatgcagtgtttcaagatgttcaaagtaatatgtttcaaaatataacattagctaagcatttccaatacatttatgaagccaatcgcacacatctcactaaacagcgtattaaggaagatgtcttacagatgatgcaattacttggtttaagacaaggggaacaattgcttgagcgttatcccttcgaacttagtggaggtatggcacaacgtgtcgcctttataatgtcattaattagacgtccgaactacttatttttagatgaaccaacgagtgcacttgatcaagaaaatattaaaaagtttatgcattaccttcttagggcacaggagcgctaccaaatgaccattgtttttatcacacatgatattaacttagtgaaagattgtgccacacatattagtattatgcagcaaggtaaattgatagaaaatggtgaggccgcgtcgatcttaactaagccgacacataattacacgaaaaaattaattacgattgcacatcggagacaaccttatgcttaaaatagagagattaaccaaatatatagacacgcaactgatatttaaagagatatcatgtacaattaacgaccagcacttactcataagtggggagagtggttgtggtaaatccacattagccaagattatcgctggcttagatacggattatcagggcgaattatatcttaatgggcgcttacgtgaatcttatacgtctaaagagtggatgaagcacatccaatatgtacctcaatatcaacgtgatactttaaatcagcgtaaaacggtattagctacattattagaaccacttaagaattataaggtaaataaacagcgttatacatcaagcattgaagcagtgcttgatcagtgtaatttaccacacgatatacttaatcataaagtttcgacattaagtggtggccaatttcaacgcgtctggatagctaaagctttaatattagaaccagagattctcatattggatgaagctacaaccaacttagatgtcattaatgaagaagctatacttcaaatgttgatttccttaaagatgacacaattaatcattatttcacatgatacatacgtcttaagccaatttgaaggaattcagttacagctaaataaattgaataattaagatcacaaatcttaatatggtgaatatttaatggtacctaaaaaataaaatttaaactacaatgtctaaatccatatgttgtttcattagaggatttaaaaatgattataacactaaaagatttcaaattattatatttaatataaatttacatatgataaacgaataacaattccaatataaattattttttgattatttttatttataactatatattttatatgaaaaatataagttataataataagtttaatattgcctcgtggttctgagcttgaacttatctctaaatcattttgagctacttatctatcaattcatatattctataacaatatttgtgacatcacgtgctatttcatgaagtgattttacgatatcaccttctttagaaaaaatatatttcagtaggcaccgacgtatacagaatcatttgagtattaaaaataaaaactagaaaaagaaaccgcatcattaactgatacgcagaatcatattataaataaaactaaaaatgaggttgtatataactcactctgaaattgattgaatatatagtatctttaataaaatgcagctattgtggcgtagaatttgagaatcaaaaaatgattaatatagtttgaagagactgagcataaatactagaaaaatggccagtaaatgagtttactataaactcatttactggcttctctaataattatcaagacaatttgcgtttctaggcatactttgaaatgcgctattttctttaagaatattaatatatgacttgtgttggtaatgataaccttggttagagtgtattgtcatgtgatagttaagattagatcttttaattaaaacattgttttaaatatcgatgacaaggtctaatgtaggacgtgtagatataaggttcggaattatataaatccataaaaggagataaatcgaaaacctttataccctgggtgggtatatgttatagtataagtagctttactataacattttcattaggaggggttaatttgaataataatggtgaagagcataatcatcaaaatcacatgaatcattccaatcaaatgcatcatgataaccatgcctcacatgatcatcatagtggccatgcacatcatcatggaaattttaaagttaagttttttgtttcattaatttttgcaatacctatcattcttttatcgccactgatgggtgttaacttaccttttcaattcacatttccaggttctgaatgggtagtgttaatattaagtacaattttattcttttatggtggtaaaccgttcttgtctggtggtaaagatgaaattgctacaaaaaaaccaggcatgatgaccttagttgccctaggtatttcagtagcttatatttatagcttgtatgctttttatatgaataactttagtagtgcaactggtcatacaatggactttttttgggaattagcaaccttaattttaattatgctattaggacattggatagaaatgaatgctgtcggaaatgctggagatgctttaaagaaaatggcagaactgttacctaatagtgctattaaagttatggataatggccaacgcgaagaagttaaaatatcagacatcatgactgatgatatcgtcgaagtaaaagccggagaaagcattccaacagatggtattatcgttcaaggacaaacatctatagatgaatccctagtcactggagaatctaaaaaagtacaaaaaaatcaaaatgacaacgtcatcgggggttctattaatgggtctggaacaatacaagtcaaggttacagctgtgggagaagatggatatctttctcaagttatgggacttgttaatcaagcacaaaatgataaatctagtgctgaattgttatctgataaagtagcgggttatttattctactttgctgtaagtgttggcgtgatttcttttattgtctggatgctcattcaaaatgatgttgattttgcattagaacgtcttgtaactgtgttagtcattgcttgtccacatgctttaggcttggcaatacctttagtcactgcacgttctacttcaattggtgcacataatggtttaattattaaaaatagagagtctgtagaaatagctcaacatatcgattatgtaatgatggacaaaactggtactttaactgagggtaacttttctgtgaatcattatgagagctttaaaaatgatttgagtaatgatacaatattaagccttttcgcctcattagaaagtcaatctaatcacccattagctataagtattgttgattttgcgaaaagtaaaaatgtttcatttactaacccacaagacgttaataatattccaggtgtcggattagaaggtctaattgataataaaacatataaaataacaaatgtctcttatcttgataaacataaacttaattatgacgatgacttgtttactaaattagctcaacaaggtaattcaatcagttatttaattgaggatcaacaagtcattggcatgattgctcaaggagatcaaattaaagaaagctcaaaacaaatggtagctgatttactatcaagaaatattacaccagtcatgcttacaggtgacaataatgaagtggcacacgctgtcgcaaaagaattaggtattagtgatgtccacgcacaactcatgccagaagataaggaaagcattataaaagattatcaaagtgacggtaataaagtcatgatggtcggagacggtatcaacgatgcgccgagtcttataagagcggatattggtatagcaattggtgcaggtacagatgttgcagtggattcaggtgatatcatacttgttaaaagtaatccatcagatatcattcatttcttgaccctttcaaataatactatgagaaaaatggtgcaaaacttatggtggggtgcaggttataatattgttgctgtacctttagcagctggtattttagcatttattggcttgattttatcacctgcaataggtgctattttaatgtctttaagtacaattatcgttgcaattaatgcctttacattaaaattaaaataaaagataggagttttattatgattaaaaaattattttttatgatattaggatcattactaatattatcagcttgctccaataatgatgaaaaagataaagacactaatgaccaaaaaagtgagagccatatgaagcataatgatgaaagtaaagttccagaagatatgaaatcgactaatgagggtgaatttaaagtgggagataaagtaacgattacagcagggcatatgccaggtatgaaaggtgcagaagctactgtaaaaggtgcgtataaaacatatgcctatgttgtaagttataaacccacaaatggaaatgaaaaagtaaacaatcataaatgggtcgtaaacgaagagattaaagatgcacctaaagatggatttagtaagggcgatactgttaaattagaagcaagtcatatgtctggtatgaaaggtgctacagccaatatagataacgtgaaaaagactactgtttacgtagttgattacaaatccaaagataatggtaaaatcattaaaaatcataaatggatgacaggaaatgagctgaaagcacgataaaaatctagttctaaattgagaaataaatagatataaaaatatcctccttaatcaataatttaaataacttattattgttaaggaggatattttttagtgtgtaaattaaaaagaattttagaagaataacatttatcaaaaaactgttcattaccttattaattgaaattatataattaaaaaccgcatcattaaccgatacgcagaggcgtatcataagtaaaactaaaaaattctgtatgaggagataataatttggagggtgttaaatggtggacattaaatccacgttcattcaatatataagatatatcacgataattgcgcatataacttaagtagtagctaacagttgaaattaggccctatcaaattggtttatatctaaaatgattaatatagaatgcttctttttgtccttattaaattataaaagtaactttgcaatagaaacagttatttcataatcaacagtcattgacgtagctaagtaatgataaataatcataaataaaattacagatattgacaaaaaatagtaaatataccaatgaagtttcaaaagaacaattccaagaaattgagaatgtaaataataaggtcaaagaattttattaagatttgaaagagtatcaatcaagaaagatgtagttttttaataaactatttggaaaataattatcataatttaaaaactgacaatttgcgagactcataaaatgtaataatggaaatagatgtaaaatataattaaggggtgtaatatgaagattaatatttataaatctatttataattttcaggaaacaaatacaaattttttagagaatctagaatctttaaatgatgacaattatgaactgcttaatgataaagaacttgttagtgattcaaatgaattaaaattaattagtaaagtttatatacgtaaaaaagacaaaaaactattagattggcaattattaataaagaatgtatacctagatactgaagaagatgacaatttattttcagaatccggtcatcattttgatgcaatattatttctcaaagaagatacaacattacaaaataatgtatatattataccttttggacaagcatatcatgatataaataatttgattgattatgacttcggaattgattttgcagaaagagcaatcaaaaatgaagacatagttaataaaaatgttaatttttttcaacaaaacaggcttaaagagattgttaattatagaaggaatagtgtagattacgttagaccttcagaatcttatatatcagtccaaggacatccacagaatcctcaaatttttggaaaaacaatgacttgtggtacaagtatttcattgcgtgtaccgaatagaaagcagcaattcatagataaaattagtgtgataatcaaagaaataaacgctattattaatcttcctcaaaaaattagtgaatttcctagaatagtaactttaaaagacttgaataaaatagaagtattagatactttattgctaaaaaaactatcgaattcttcaactacagaaaatatatctatagatatatcaagatttttagaactaagtaatatgatactcttgttagatgatatgctcgacgtcaatatatatatataaattcttttaaaaataatacattagagacatttgatgcgactgatcctgaagttgattacatcactgaaataggagattacttattaaaatatgacgttaattctataaatgatgtcagaattgaagtgatagataatttggggcattcaaataatatgctactaaaaacgatactacatgcagaagttgaaatggaagatggaaagaaatatttattacaaaatgggaaatggggttattttaatagagaattttttgaccttttgaatgatcatttgaatgagatagaaattaggtataacacactaactcccacaggtttagtatttaaagaaggagaagaaggatatataaaagaaatagtaggaagattgccagaagaatatttaatgttacataaaaaattcataaaaccaataaataagaattttatagtaaaaggaaatggaatagagttggcagacttatacaatattaaaaacaaagagcttttcacgattaaaagaggaattaatacatctttatctctttatagtctagaacagaatataatagcaattaacgccttaaaatatccagaatcatataattttgaagaattaatagaagctattcctgataactcggaaaatatatttaatgatatacaacggagtacaaattttagtatagtatggattttaccgatatcatctattgataatatgcccataaaagatatggttcatactagtaacgtaataaataaaaactttcaattaactaatttaggttcagtattacttaaaaataaattagtagagtggtctctctatttaaaagatcaaagaattaatccaattatttatatggaaacgccaactgaagatagaaattaaacttttattttaaatcaccctagttcatacctaaaagactttcacacaaacaaaggaggaaacttaaattcctcctttcccttattactcatactataattcaattttaacgtcttcgtccatttgggcttcaaattcatctagtagtgctcgtacttctgcaattgattgtgtgttcatcaattgatggcgaagttcgctagcgcctcttatgccacgcacatagattttaaagaatctacgcaaactcttgaattgtcgtatttcatctttctcatatttgttaaacaatgatagatgcaatctcaacaaatctaatagttctttgcttgtgtgttcgcgtggttctttttcaaaagtgaatggattgtggaaaatgcctctaccaatcatgatgccatcaataccatatttttctgcaagttcaagtcctgtttttctatcgggaatatcatcgttaattgttaacaatgtgtttggtgcaatttcgtcacgtaaatttttaatagcttcgattaattcccaatgtgcatctactttactcatgcgtttgataaaaacttaaataatattaattcggtcatcagtggcgttaaatcttttatcatttttagttatagttgataaatttatatttataagcatatatggatatttcatcaaaaatttttatttatataaatccgaactgcatacatatttgtttaaataagaggtattatttttcgggaaattgctgtctgagttaaaaggattagttttataaaatgagttgaactatagcaaaaacgattaaaatactgataatccatttttgtattatgttagggacttttttacttaattttaaccctattggagcaaatataatactccctattataaggaataaggcgtcatataaagggatataaccttgaataagtttgatgacaaaagcaccaattgaagatataaaagcaattactatactattagcgactacagtattcattggtaatttgaataaaaccaataatataggaataataatgaaggcaccacctgcacctactatacctgaaataataccaatgaaaaggccaatgataactaataaatatttattaaatgaagacttttcggaactaggtttcactttaataaacattaatgttaatgcaagtaaagcaataatgatatataccgtatttacaaatgtagcatcaaataaatttgctagaaatgcacctaacatactccctataatcatgccgccacccatataaagaactaattgtggcgagaactctgttttttttcgagcttttaatgagccacttaatgtactgaaaaagacttggctagaagtaagacctgatgcgatatatgcgctatatgcaggggctccgaataatggtggtaataataaaatagctggataaataatgatagcaccacctacgcctactagaccagatatgaacccaccgaataccccaatgagtaacatgataactatattaacaatatccattacttacttttcaccaataagtttacagcttcattaattaactcttgggagctttcttcatcatccgcagctgcttttacacattctattaaattctcactaataatgatacccatcaagcgttggagtgaactctttgatgcacttatttgtgtaatgacatctttacagtcttttccttcctccatcattttaataattccatttagttgcccttgtattctattaatacgattaatcatttttttatcataattcatagtcatacctccacttttaattgaataaaaatatattaatagataaacacaaatgtgtcaaatacccctagaggtatttgacaagttccatccaactgtttaaaatacccctacaggtatttttagggaggttattatgaaacaatacggagaaaagtttatcgatgaatttagtaaagcagaattggaaaaactagccaagcaagggcaattaattgacgttagaacagaagaggagtatgcattaggacatatcaatggttccatacttcatcctgttgatgagattgagtcattcaataaagaaaaaaataaaacctattatgtaatctgtagaagtggtaacagaagtgctaatgctagtaaatatttagctaaacaaggttataacgttataaatcttgatggtggttataaagcttatgaagaagaaaacgatagttatgatacacaagaagaatataaaagtatagaaattaaagcagatcgtaaacaatttaactatcgtggtcttcaatgtccagggccaattgtaaaaattagtcaagaaatgaagaatattgaagtaggtgaccaaattgaagtcaaagtcacagaccctggattccctagtgacattaaaagttgggtgaaacaaacaaggcatactttagttaagcttgatgaaaataacaatggaattaatgcgattattcaaaaagaaaaagcaaaagatttagatataaattattctgctaaaggtactacaattgtattatttagtggagaattagacaaagctgtagcagcgttgattattgcaaatggtgctagagctgctggaaaagatgtaactatcttctttactttttgggggcttaatgcattaaaaaaagtgcaaacagttaatgttaaaaagcaaggtattgcaaaaatgtttgatttaatgttgcccaaaaagaatatacgaatgcctctttccaaaatgaatatgtttggtttaggaaatatgatgatgcgctacgtaatgaaaaagaaaaatgttgattcattaccaacacttatcaatcaagctattgagcaaaatatcaaattaatcgcttgtacgatgagtatggatgtcatgggtattcagaaagaagaacttagagatgaagttgagtacggtggtgtaggcacttatattggtgctactgaaaatgcgaatcataatttatttatctaattaaatctattaataaaaggagttgttatcatgttttttaaacagttttacgataatcatttatctcaagcatcatatttagtgggttgtcaacgtacaggagaggcaataataatagaccctgttcgtgatttatcgaaatatatagaagttgcagattctgaaggtttaacaattacacaagctacagaaacacatattcatgctgattttgcttcaggaattcgtgatgtggctaaacgcttaaatgcaaatatatatgtgtctggcgaaggtgaagatgcattagggtataaaaatatgccatcaaaaacacaatttgttaaacatggagatatcattcaagtaggcaatgttaaattagaagttctgcatactccaggacacacgcctgaaagtattagctttttactcactgatttaggtggtggttcaagtgttccgatgggattatttagtggtgactttatttttgttggtgatataggtagacctgatttattagaaaaatctgttcaaataaagggttctacagaaattagcgcgaaacaaatgtatgagtccgttcaaaatattaaaaatttaccagactatgttcaaatctggccgggtcatggtgctggaagcccttgtggtaaagcattaggtgccatacctatatctacaataggttatgagaaaattaataactgggcatttaatgaaattgatgagactaaatttattgaatcattaacatcaaatcaaccagcaccaccgcatcattttgcacaaatgaaacaagttaatcagtttggtatgaatttatatcaatcatatgatgtttatcctagtttagataataagagagtagcatttgatcttcgtagcaaagaggcctttcacggtggccacacaaaaggaacaatcaatataccatacaacaaaaactttattaatcaaattggttggtacttagattttgaaaaagatatagatttaattggagataaatctactgttgagaaagcgaaacacactttacaattaattgggtttgataaggtagcaggctatcgtttgccaaaatcaggcatttcaacccagtccgttcatagcgctgatatgacaggtaaagaagaacatgtattagacgtacgtaatgatgaagagtggaataatggacacttagatcaagcagttaatattccgcatggtaaattattaaatgaaaatattccttttaataaagaggataaaatatatgtacattgtcagtcaggtgttagaagttcaattgcagtgggtatattggaaagcaaaggttttgaaaatgtggtgaatattagagaaggctatcaagattttccagaatcattaaaataatttaaggatgtggaaaaaatgaataagcattatcaaattgttattattggtggcggtacagcaggtgttaccgtagcatcaagactattaagaaaaaatcaaaacttaaaagagaaaatagcaattatagatccagcagaccatcattactatcaaccattatggacgttggttggtgcaggggtatctagtttgaaaagttctcgtaaagatatggaaagtgttatacctgaaggtgctaactggataaaacaggctgtttcaagtttttaacctgaaaataatagcgttattttaggagataatacagtcgtttattatgattttttagtagtagctccaggattacagattaattggtcttcaattaaaggactaaaagaaaatataggtaaaaatggtgtttgctctaactattcacctgactatgttaacgaaacttggaaccaaatttctaattttaaacaaggaaatgccatttttacgcatccaaacactcctataaagtgtggaggtgcgcctatgaaaattatgtatttagctgaagattattttaggaaacataaaatccgttctaacgctaatgtgatatatgcaacgccaaaagatgctttatttgacgtaggaaaatataataaagaattagaaaggattgttgaagaaagaaatataacagtcaattataattataaccttgttgaaatcgacggtgacaaaaaagtggctacattcgaacatatcaaagcatacgatagaaaaacaataagttatgatatgttacatgtaacaccacctatgggtcccttagatgtagtaaaagaaagtacactttcagatagtgagggttgggtagatgttaacccaaccacattacagcataaaagctactctaatgtatttgcacttggtgatgcttcaaatgtacctacttcaaaaacaggcgcagctattcgtaagcaagcacctatcgtcgctaataatttattgcaagtgatgaataatcaaatgttaacgcatcattatgatggttatacttcatgccctattgttactggatataataggttaatacttgcagagtttgattataataaaaatactaaagaaacaatgccgtttaatcaggccaaagaacgtagaagtatgtatatatttaagaaagatttattacctaaaatgtattggtacggcatgctaaaaggattaatataataaagtacagaaaacaataaatttttaatgaaaaatcttttactataaaagattaagtatttaaatgacgtgtcagtgttgtgtttatatgtcgtgaatttttagctctaaatagtataagattgaaaaagttgttactgttttaaatgatcacgatgaagtcattcaataagaatgattatgaaaatagaaacagcagtaagatattttctaattgaaaatcatctcactgctgttttttaaaggtttatacctcatcctctaaattatttaaaaataattaatggtatttgagcacgtttagcgactttatgactgacattaccaatttccatttcttgccagatattcaaaccacgtgtactcaaaatgatagcttggtatgtacctccaatagtaatttcaataactttgtctgttgaacactaagagcaattttaatttcataatgtgttgtaaacattttttttgattggagtttttttctgagttaaacgatatcctgatgtatttttaattttgcaccatttccaaaaggataagtgacataagtaaaaaggcatcatcgggagttatcctatcaggaaaaccaagataatacctaagtagaaagtgttcaatccgtgttaaattgggaaatatcatccataaactttattactcatactataattcaattttaacgtcttcgtccatttgggcttcaaattcatcgagtagtgctcgtgcttctgcaattgattgtgtgttcatcaattgatgtcgaagttcgctagcgcctcttatgccacgcacatagattttaaagaatctacgcaagctcttgaattgtcgtatttcatctttttcatatttgttaaacaatgataaatgcaatctcaatagatctaatagttccttgcttgtgtgttcgcgtggttctttttcaaaagcgaatggattgtggaaaatgcctctaccaatcatgacgccatcaatgccatatttttctgccagttcaagtcctgtttttctatcgggaatatcaccgttaattgttaacaatgtatttggtgcaatttcgtcacgtaaatttttaatagcttcgattaattcccaatgtgcatctactttactcatttctttacgtgtacgaagatgaatagataaattggcaatgtcttgttcgaagacgtgcttcaaccaatctttccattcatcgatttcatagtagccaaggcgtgttttaacacttaccggaagcccacctgctttagtcgcttgaataatttcggcagcaacgtcaggtcttaagattaagccggaacccttaccctttttagcaacatttgctacaggacatcccatatttaagtctatgcctttaaagcccattttagctaattgaatactcgtttcacggaactgttctggcttatctccccatatatgagcgaccatcggctgttcatcttcactaaaagttaagcgtccgcgcacactatgtatgccttcagggtggcaaaagctttcagtatttgtaaattcagtgaaaaacacatccggtctagctgcttcacttacaacgtgtcgaaagacgatatctgtaacgtcttccattggcgccaaaataaaaaatggacgtggtaattcactccaaaaattttctttcataatatatttataccctctttataattagtatctcgattttttatgcatgatgatattaccacaaaagcctaacttatacaaaaggaatttcaatagatgcaaccatttgaaagggaagtctaagagtagtctaaaataaatgttgtggtaagttgatcaatacaaagatcaaggattatagtattaaattgttcattattaatgatacactacttatgaatatgattcagaattttctttggctacttttacagtaaagcgattttttagttatcttataacaaagacaaatttataaaggtgatattatggaaggtttaaagcattctttaaaaagtttaggttggtgggatttattttttgcgatacctatttttctgctattcgcataccttccaaactataattttataactatatttcttaacattgttatcattattttcttttccataggtttgattttaactacgcatataattatagataaaattaagagcaacacgaaatgaatcattaatacgaatgtgattaaacataaaactgaaggagcgattacaatggcgactaagaaagatgtacatgatttatttttaaatcatgtgaattcaaacgcggttaagagaagaaagatgatgggagaatatattatttattatgatggcgtggttataggtggtttgtatgataatagattattggtcaaggcgactaaaagtgcccagcagaaattgcaagataatacattagtttcgccatatccaggttctaaagaaatgatattaattctagactttaccgaagcaacaaatctcactgatttatttaagaccataaaaaatgatttgaaaaagtgaagtagtgaagtgtgggtgcagagagaactaagcccatcgataaatggtcgcttgttaaagaagagtgacggtcactcttctttatgtgcatattttattttgcctgttttgttaacaagcagcagtgtaacaaatatgagtaaggataaaatgagtataatatagaaaccgaatttatcattaatttcattaatccatcttcctaaaaatggagcaattaaactttgcagtaacaatgaaattgacgtccatatcgtaaatgagcgaccgacatatttatctgaaacagtgttcattatagctgtattcatataaattctgattgatgaaattgagtagcctagtataaatgatcctatgaataagtaaaatgctgagtttatccaaataaatagtgctgaatttatgactaatatgaaatataacaaaaatatcaatactttagttgagattttcttcgaaagaatagctgaaattaaacctgcacataatcctccaatgccatataacatatctgaaaaaccaaattgtacagacgaaagttttaaaacattataaacatatcctggtaatgatatgttaaagatcattgtaaacaccattggtatgattgaaataactccaaaaataaatatcatcatgttgtcttttaaaaatttccatcctaataaatattcttgcaataagctatttgttgattcttcctctgaatgagttggtttatctacatgcaatctaaataacataaaaatgctgattagaaacatcattatagtcatcgctataattagagtgaatccatttattttatataatattcctgataatccacctgcaataaacatacctgtttgcaaactaatctctaatagagaatttgcatctgtatattgatctggttttaatatctgtttaactaaacttctagatgttgccatatacgtagtccaacctatcccattaacaatcgcaaatccaatcactaaataggtctcaaatcctatcattacgagtgctatgacaatgagtaaatataatattacctgaagaagataggtgattaaaataatatttcgtctattatatttatcggctagtccacctattataggagaagctaagaaaccggataatacatttaaagctaacataatacctaatagttgggagtcgttagttttgtcgattaaataccaattagccccaactgtactaattccaactccgaatgctgaaattatttctgctaaaaagaacaatctgaagtttttaattttcaacaaatcagtcataaatatcaccttttttcaatgcaagatttatatttgcgagctcttctataaattgagagtcgtttaaaatatcgaatggtttattgccttcgccgatcaaaaatctatagttagtaatattcataaactcaaatattaatttgaattggttgactaaaggttgtgctttggtatgcggattgtcgccacctatgattaaaatcaaatactttttttgtgacatgatttctttgaagttgtctatttgcgtatctcgcaatgactcggtccatctatcaatgaagagttttaaagacgcactcatggagtaccaatagagtggtgttgaaaaaataataatatctgattctaaaactttgattaaaatttgttcgtaatcatcattatgaaagttggcacctttgctatgacgattatctgtaaccttttcaatgttgctttgatataaattcacaaagttgacttttaaattcttcaatagattctctactgcgatagctgaattgccacctttctactacttccaaataaacaagtaatcatagtcataactcctttcgatttacctttataataatatttaatatattattattaaatcagaattcttagaattcaggattcgataaaagggaaccctaaaggaggtactactttgaacttaaacattttaaaatcatttttagtaactagtgaaacaaagaaccttactaaagcatcagagttacttaactattcacagtcaactgtatctacacatattgaaaaattagaaaggcaattagatgttaaattattttatagaaaaaaatatggtatggaactaacggaagaaggcttagcatacgttaaatacgctaaagtgattttagatagtaatagcgaatacgagagagaaataaaaggactttacaataagaaggtaaatataagtattaacatgcaagaaagtcagtatttgtatcgctactataataagattagtgaatggttagctgaacacccatatgtaaacttgaagtttaaatccgcacattctaatttctatattaaagaagaaattgctaatttcaaatcggatattagccttatcacagacgaaaagattattaatagtaacttaactgctattcctataactgaagaacgtttaatatttgttactaacaaagagatgaaagatttcaaattaaacgatattcaaaaccatacattacttgttactgaaaaagggtgtagttacagagaacagttagaaatgattttatataaatatagcttttcaacaaaacaaatgattgaatttctaggaattgagtcattaaaaaaacacttgaaaaattcaggtgggattgcgctattgccggaatttattgttgcagatgaattagaaaataaaagtttgtttcaaatagacgtagatgtcgatattccgaatttagaaacaacattgataattaatcctgaatcgaataagcaagtacttgaatcttttgtaaaagatgtttttttataattattggtgaaaacgtgtagttatggtgaaactcaaagataataatttaaatgagatgttaatgaaaaagtaattcaatataaaaacaggtgatttatatctttaataaggattatttctagttgaaatttcaaattgcgggcattcattttcaaaatagtaaagaatttaatagatgaaaacctttgaatcatactagttagtatggattgattaatattttaacctgctaaatgagtagcttatgtattttaaatagctgtcatctagcaggttctttattattaataagttcagataaattattttagtctgttttctaatgttgataataataactttaaatctgtactttcattgtgagatatatagtacatcataaatttttatatttggattgagactctttggaagattttcaataaatgaatatttcacaaacttccacttatcaggattataaattataatttctgcaactgcattatcgaagattctaaacaattttttgatttctatttcttttagagataaagtagggaaaatgtcgatatattcttcaagcgcataaagactatgtttaacagaatcggttatgttcattgaatatatcacaccaatatttatattttgccatccaaaagaagaaataacattatcataaaatccattgaatataaattcagtcatcccctctgaacttctccataaatataatggtgaataagtatttgtaatgcaattagtagttgtttgacttattaaataagcttttataattaaatttttaaatccatcagtcttataaccatttaatcgaactctatctctaattatttccatattgtaatcactaggcaacttaacatgatattgcattgcatgcatttagcatacccccttttataaaaaggatagcaataataagtaaaatctcatattatccaattgtgatatagttatcataaaaagtgataggtgattaaattgaactttaatgatttggaaatttttataactgtatgtgaagaagcatctatcaataaagctgcaattaaacttagatatgcacaatctaatatatctcaaagaattagcaagcttgaaaatgaattaggtgtagttttgctttttagaaatcaaaaaggtgctaaggcaactaaagcaggcgaagaattcttagcgtatagcaaaaaagtattaagagatacagagactataaaaaataaaatgaaaaataatactatgtctattttatgctcagaactgttatttaattatttatctgagagcgaagaaattatgatgtcgaataactcaattaattttatttctagtggaaatattagaaaagctatagaaaaaaataattatgataaggttatttcattcataaaaattaacgactcaaattatagacttagtaatgttgatactatgaaagtaacgctttacagtaatggaagtaattatgataaagaggctttactaataaataaagatgagttttgtcctttaaggaaaataactttagataataagcttgattcacaacgggtaatggaaattgattcattggcagcaataataaacttagttaaacaaggaaaaggaaaggctttattacctatgacttttgagaataaaagagatatagtacaggacatttctaagatatttgaagttaactactatacttataatcatattatgcatcattaattgaaagttgattgagtttaaattacaggaacgattttaaaagtctagtagttagaatgagcgatgtgacagaaaagaaattatgccttttattttgtaaattcgttgttttaaagtaaaggtccttgtagtataggaaaaagtggatgacttctccgcctttaccaccctttcaagcataatgataactgctaaatattgattatagcaccattgcaaaactaatcattaattgtcatattcaactattttgaaaagtatcaatttcacattatcaaattattgagtatctcaatttattgttatacacaaacagtatttttgttatcatagagttaataaatataataaattaaacaagtaactttacaaaaattagaatgattcaattcaatcataattgtttgaaaatagaggtgagcaggtgaacgatatgttaattagtcttgtaatcccagtttttgctttgttagttattggtggtattatttggatgattatagaaggtatagtacatatttcaaaaaagaataaagcaattgataacttttttaaccaagttaataaagtaagtgagacatataaattcgctactacttttttatttctaatcttggctacggctggtatttctcaattttatctatattatatagtatcagcgtttcttttttggcttgtcatacttacctttggcattgcaggtatcatttttttaatgccatatggattatgttttctaccgttttataagcaaaaaaagaaaaaacagacatttaaaaaatacatggtttacactacgattggtttgtcaatttgtctaggcttatctctagttttggttcacactacgaaaatttatatggacgaaggtggcgtaagatactattacggtagttttgtaatgaaacaagcgggcggttatgcttatttagctttagcggtactttcaacgttgttaattgttgcgaaaaaagctacaaataaaaataaagaaatcgaaaccgtcgacaatacaaatataacggaaagataattaagggagtgctcattcaggagtgctcttttttgatgtccaaatttagttgcaaatgaaggcatagaagaaatttttatagtcatttattggataatgaattatggtcatatcgattaattttattagtgaggattttacaaacatttgttgaataaatatggtaatgataatatatgaatatttttgaaaaaacactaatatgattaaattatttgttaaaatagcattaagtaaaaaacaaatagggaacaaggtgggatttcatgagtcaattgctaaatgatacgttatcggcttggttgttaattgaatctttaagtccaggagaagtaaattttacagcggaagatatactctcagctgaacattttaaaaatggtgcaaagcaagcacaacttcaaagttttgatgaatattttgaaatatggaatgctgaacgctttattatatcagaagaaaaatcagagactggggaacttatatttaaattttatagacattgcttccgctataatgaaattaatttgaaaattcaggatatttttgatgattattctgagattcataatccaaatgggacacactgttatggttacacatttaacacagataaacacggcaaagtgatagttgattctatacatattccgatgattatgagtgcattaaaagaaattgaaaagaacaaaaatgccaatatagaagaaaaatttaatgattctgttgaaaaatttgttcaaaaagtaaaagaaattttagcagatgaaccaattaatgaatttaaattgaagaagatggacaaagcttatgatgagtacttttctgtattaaattcaaagaaagatggattatttggacattatgtagcaatagaatatgtgaaagatagtgatttaccacagccggaatttaacagcttcttcataagtgatattgagaaagcaagaaaatctcccaaccaaactttaattgattacattgaaggtgtagaagaaagtcagcacatagaagtagatgaaaataaagaaatgtttgacaaatttttacatccttcacgtttgcctgatggacgatggccatcacagactgagtttagattgtctttaatgcaacaacttgctgtaaaccaaattacgagtggtaatgaaagaataagttcagttaatgggccaccaggtacaggtaagactactttattaaaagatatatttgctcatctagtagttgaaagaggtaaagagttagctaaactaaataatcctaaagatgcatttgtcaaaacaaaaattcatgaaacggatgataaatacgtatacttactaaaggaatctattgccaaatataagatggtagtcgcatctagtaataatggagctgttgaaaatatatctaaagatttaccgaaaattgaagaaattataagaaatcccgaaaaatgtaaattccctaaatatgaacagaattatgcaaatttagcacatgaattaaaagattttgctgaaatagctgaagatttgattggtgaaagtgcctggggcttattttctggagtttttggtaaaagtactaatattaaccaagtattgagtcatatgttaaaacaagatgcgaatgatattggctttgctaaattactacaaaatgagaataatcgtatgagttataacgagttaatgagtgaatggcaatcacatcaacgtgcatttttagaagagttgaggcatgttgaaatgttaaaagaagaatctattagagcatatgatgtttataaaaattgtgagtctttctctaagattgaacaggttattaatagtgaaaaaacaagtattgaagaacaggtatatcatttagataatgaaacgttacgagacaataaagaaatagaagatttggataatcgaattaattatattgttaagcaaatagaaactttaaatgagttaattaaatccatcaaagaaagcaacaaaggttttattaacaaactgaaagcgatgtttaattcagaagaagatgaaagctataaagatcataataaagagaagcaacaattattaacacaacagttagagttagagaaatgtaaaaaaaacaaacatgaagaccttgttagcaaactaaaagaaaaagagaaattaattaaacaattaactaaagtacagttgcaattagacgagttaaattcacagttacaagagttagaagcatatcgtattgagtcaaaaattacaattccagaaaaagatttttggagtgacaacaattatgatgagcgccaagttactaatctgtggacgagtgacgaacttcaatacagacgtgccatgctctttttaagagcaatgatattgcataaattattattgattgctaataatacaactatttattatgcgattaatgattttaaagatagaaggaaattaattgatgcaaatccagataaagtacacaacgcatggaatgtgatgcatttaatatttccagtagttagtacgacgtttgcaagctttaaatctatgtatgggggcataccaaaagatttcatagactacttatttattgatgaagcaggacaagcaatacctcaagcagctgtgggagcattatatcgttcaaaaaaagttgtagctgtaggtgatccgattcaaatagaaccggttgtgactttagaaagtcatttaattgataacattcgtaaaaattatcatgttccggaatatctagtttctaaagaagcttctgtgcagtctgttgcagacaacgccaatcaatatggtttttggaaatctgatgctactgatagtaatcaaaaaacctggataggcatacctttatgggtgcacagacgatgtttaaaacctatgttcacgatagctaaccaaatcgcttataataataaaatggtgttgccaagtaatattacaaaagtaggtaaaacaggttggtatgacgttaaaggaaacgcagttcaaaaacaatttgtgaaagagcatggtgaaaaagtagtgggattattagctgatgattggattgaagcaattaaggaaggtaaaaatgaaccgagctcatttgtaatatcgcctttttcagcagtacagcaacagattaaacgtatgttaaagcaacaactaccgactagaattgatattgaacgtacaaaaattaatcaatgggtcgataaatccattggtactgttcatacttttcaaggtaaagaggctcagaaggtgtattttgtaataggtactgataatacccaagatggtgctgtgaactggtcatgcgaaaaaccaaacttgttaaacgttgcagtgacaagagctaagaaagagttttatgtaattggcgacatgcaaagaatacagatgaaaccattttatgagacgatttttaaagaaagaaatgtaaaataacatacaaaaaagtatatagaggaagttatacattttaaaaggagcaaaattgaataatggagaaatttaacaactggatattaaatgcaataagtggatctcaaacagacaagaatgaaacaactgaagaattaaaaggggcaaaatttatcattttatatgcatattcaatgctcgttttgcttgcgttagtaatttctaacatattcattcacattttggagcctaaactatcaatcaccactcaaatcatcatcgttttgattttaattgaagcactaattggactgcgtttcttgaaagcgtacgatgttaagcgtggcaaagataaagaaaataagaaaaatagtaaggatttcgttaaactaaaatcaattttagtagcaattttatttacatcattggcgctgacagcaggtactgtagctgatatatacggtttcactgacttaggaaatactagaagtgatttaatcgtttggagcataggtggtattatatttggcctcgtatgttacacaatggaagataaaagataacgataaggagctggcgattataaagctagctccttttttaacttatatatgtaaagaactatcctaagggtttttaatcatatgtcaataatttctataatacattattaaaacatcaattaaataagttttaaaattttacacatatttttatttaaaaaagatgtataattaatgtattaaatatagaaagaagttgatattatgaaaaagtgtattaagactttgtttttaagtatcattttagtagtgatgagtggttggtatcattcagcacatgcgtcagattcgttgagtaaaagtccagaaaattggatgagtaaacttgatgatggaaaacatttaactgagattaatataccgggttcacatgatagtggctcattcactttaaaggatccagtaaaatcagtttgggcaaagactcaagataaagattaccttacccaaatgaagtcgggagtcaggttttttgatattagaggtagagcaagtgctgataatatgatttcagttcatcacggcatggtttatttgcatcatgaattaggaaaatttctcgatgatgctaaatattacttgagtgcttatccaaacgaaacaattgtgatgtctatgaaaaaggactacgatagcgattctaaagttacgaagacatttgaagaaatttttagagaatattattataataacccgcaatatcagaatcttttttacacaggaagtaatgcgaatcctactttaaaagaaacgaaaggtaaaattgtcctattcaatagaatggggggtacgtacataaaaagtggttatggtgctgacacgtcaggtattcaatgggcagacaatgcgacatttgaaacgaaaattaataatggtagcttaaatttaaaagtacaagatgagtataaagattactatgataaaaaagttgaagctgttaaaaatttattggctaaagctaaaacggatagtaacaaagacaatgtatatgtgaatttcttgagtgtagcgtctggaggcagcgcatttaatagtacttataactatgcatcacatataaatcctgaaattgcaaaaacgattaaagcaaatgggaaagctagaacgggttggctgattgttgactatgcaggatatacgtggcctggatatgatgatatcgtaagtgaaattatagatagtaataaataaggattcaataatgatattaagacgagtatgaaaatagttagattctaattattttcactactcgtttttattttgaaaataagtaataattcaacaatattataaattgaacagattgtttgtgaaatttttgataatattaaagtgaaaaagtgttataaattgataaatatatgtaattaacaaaaacaaatcattttaaaaagaagagagttgtaagatgatgaaacgattaaacaaattagtgttaggcattatttttctgtttttagtcattagtatcactgctggttgtggcataggtaaagaagcggaagttaagaaaagctttgaaaaaacattgagtatgtaccctattaaaaatctagaggatttatacgataaggaaggctatcgtgatgatcagtttgataaaaatgataaaggtacatggattataaattctgaaatggttattcaacctaataatgaagatatggtagctaaaggcatggttctatatatgaatagaaataccaaaacaacaaatggttactactatgtcgatgtgactaaggacgaggatgaaggaaaaccgcacgacaatgaaaaaagatatccggttaaaatggtcgataataaaatcattccaacaaaagaaattaaagatgaaaaaataaaaaaagaaatcgaaaactttaagttctttgttcaatatggcgactttaaaaatttgaaaaattataaagacggagatatttcatataatccagaggtgccgagttattcggctaaatatcaattaactaatgatgattataatgtaaaacaattacgcaaaagatatgatataccgacgagtaaagctccaaagttattgttaaaaggttcagggaatttaaaaggctcatcagttggatataaagatattgaatttacgtttgtagagaaaaaagaagaaaatatatactttagtgatagcttagattataaaaaaagcggagatgtataatcatggctcaatcagaatatgaaatcaatcccggaaaaagagagtgatgaaatgataaaacgtgtaaataaattagtgcttggtattagtcttctgtttttagtcattagtatcactgctggttgtggcatgggtaaagaagcggaaataaagaaaagttttgaaaaaacattgagtatgtatccgattaaaaatctagaggatttatacgataaagaaggatatcgtgatgatcaatttgataaaaatgataagggaacatggattgtaaattctcaaatggcaattcaaaataaaggagaagctctaaaaataaaaggcatgcttttgaagatagatagaaatacaagaagtgcaaaaggattttactatactaatgaaataaagacggagaaatacgaagtagctcaggataatcaaaaaaaatatccagttaaaatgattaataataaattcatttctactgaggaagttaaagaagaaaacataaaaaaagaaatcgaaaactttaagttttttgcgcaatatagcaattttaaagatttaatgaattataaagatggagatatatcatataatccagaggtgccgagttattcagctcaatatcaattaactaatgatgattataatgtaaaacaattacgtaaaagatatgacataccaacaaataaagcgccgaagctgttgttgaaaggtacagggaatttaaaaggttcatcagttggatataaaaaaattgaatttacttttttagagaataaaaatgaaaatatttactttactgatagtctacatcttgaaccgagcgaggataaataatcatcttttaaccagaatatgaaatcaatctaggacaacctaataaaaggagagagttgtaagatgatgaaacgattaaacaaattagtgttaggcattatttttctgtttttagtcattagtatcactgctggttgtggcataggtaaagaagcgaaaataaagaaaagttttgagaagacattgagtatgtatccgattaaaaatctagaggatttatacgataaagaaggttatcgtgatgacgaatttgataaaaatgataaaggtacatggattattggttctgaaatggcaactcaaaataagggggaagctctgaaagttaaaggtatggtcttgtatatgaatagaaataccaaaacaacaaaaggatattattatgtaaatgcaataaagaatgataaagacggaagaccccaagagaatgaaaaaaggtacccagttaaaatggtcgataataaaatcattccaacaaaagaaattaaagataaaaacataaaaaaagaaatcgaaaactttaagttctttgttcaatatggaaactttaaagatttgtcgaagtataaagacggagatatttcatataatccagaggtgccgagttattcggctaaatatcaattaactaatgatgattacaatgtaaagcaattacgtaaaagatatgacataccaacaaataaagcaccgaagttgttgttgaagggtacagggaatttaaaaggttcatcagttggatataaagacattgaatttacgtttgtagagaaaaaagaagagaacatttactttagtgatgggttaatttttaaaccaagtgaggataaataatcatgactcgatcaaaatatgaaatcaatccaggaaagataataagaagaataggattgtgaaattatgaaacgattaaacaaattggtattgtatattagttttttgatattagtcattagtttcactgctggttgtggcataggtaaagaagcggaagttaagaaaagctttgaaaaaacattgagtatgtatccgattaaaaatctagaggatttatacgataaagaaggttatcgtgatgacgaatttgataaaaatgataaaggtacatggattattggttctgaaatggttgttcaacctaaaggggaacgtatgaaatcaaaaggtatggttctatatatgaatagaaacactaagactacaaccgggaagtatatagtgagtgaaacacttcatgatgaagatggtagacctaagagtaaagataaagaatatcccgttaaaatggtagacaataaaatcattccaactaaaggtatcaaagacgaaaatataaaaaaagaaatcgagaattttaagttcttcgcgcaatatggcagctttaaagatttgtcgaagtacaaagacggcgatatatcatataatccagaggtaccgagttattcagcaaaatatcaattaactaatgatgactataatgtaaaacaattacgaaaaagatataaaataccaacgaataaagcaccaaagttattgttgaaaggttcgggagacttaaaaggttcatcagttggatataaagacattgaatttacttttgtggagaaaaaaggtgaaaatactttttttactgatagtctacatcttgaaccgagtgaggataaataatcatccacacacacgattcaatatgaaattcaaatatgttgctgtaaaataatgtaaaataaacgtattcatattactgaattgagggatagtatgcaacgtgattatttaattcgagtagaaactgagagtatgtcagatttcaaaaggctcaatagtttaatgattggttttgttattaaaggtgaggcacacatttatgatgaaaataatatgacgcaatgcaacagtggcgacattttcatcattaaccaccgcgacttgtatcgatttcaacttcaacaagatggcatcatatgttatatccaattccaaatgaaatatttagcagacaagtttgatgatgtgcattgtctatattttcacttaacagatgcgaccacaacaaagaatatacatcaactgagaaatataatggcaagactggtttcaacacatatccgacataatgagttgtctaaattgactgagcaacaacttgtgattcagttgcttatgcatatgattcattatgtcccgcgtacatatcattcgaaccaaagtatcttaaatgatgataaagtgaatcaagtatgcgactatatcgagttacattttcatgaagatttaagcctttcagaattaagcgaatacgttgggtggtcagagagccatctgtctaaaaagtttacagaatcgctaggtgtaggattccatcatttcttaaatacgacgcgaattgagcatgcgaaactcgatttgacatacacagatgaaaccattactgatattgcattgcaaaatggcttttcaagtgcagcgagctttgcgagaacatttaaacactttacgcatcaaacacctaaacaatatcgaggtgatcgtccagcaatcactgaaaaccagcaatcggcacaacatgattatcacgaccgtgaattgatattacttttaaatgactacattgaagaaatgaatcattttattgaagatattgaaaagatgaactataaagagattgcctttcaaccaaccaatcaccaactaaatcaatttaatcatattattcaagtgggctatttgaggaatttgctcaatacacagtatcaatcacagttgcttacatgtcatcatgattttcaagtcaatgaagtattagcatatgatgtgattccatatatcatgaaaaagctcaatgcgccattcacgtatgatgcagaaatttcgaatatattttatgatattgatttgtgtttagactttttattagatcataactttagtttgaccatgcatttggatcagtatgactcacgtgattatatcgatgcatttaaaatttttatccatcacgttgccctgcatgtcagtcatagaaaagatttgaagttcaacttgtatgtgacgacattgcacacgtctttgattgaaatgattgattattttaaagcattattccctaatggtggcttgtacattcacttagatcaagctacggaaagacatctaccattattgaaacgacttgagccacacatcgaccattttgtatttgatgccaattcaaatgacgctgttgattttaataaaatgaatgatgatgaatttaaaaccgcgagtcaaatgattattaataaaacgaattaccttatcgacttaatgcatcgtcatcgcctaaagcgtccactcattttactcaattggaatacattgacgggtgatacatttattacaaacggcgaatattttagaggtggtatcatcattgagcaattattaaaattaagttctaaagtagagggtatcggttattggttgaattatgatttgcacgtcagtcattgtaaaaatgaacgggattatatgaattctattgaactatttcatcaatataatggaaaacgtccggtctatttcacggcattgctatttaataaattaacaagcaatattttgtattctgatgatacatgtattgtcacggggactgattcaaattttcaaatattgttatatgatgcaaagcattttaatccgtacttagcgttggacaatcaaatgaatatgcgtgcgacggaaatgattcatttgaacattaatgccctggaagaaggtatgtataagattaaacattttaccttagataaagaaaatggtgcgttatttaatctttggcgcaaacatcatacgatacatggcatggacaaggactctatagattacgttaatcgaatgagttttccgaaattagaagtatatgatatagatatcacggacacactggcattaaacattaaaatgattacgaatgggattcacttaattgaagtaaaacgttacccaagttcataaaatgatcacaaatcacaaattttgatatacataatttgtgattttttatattcaaagctaaaattgcaaaaaattaatggttaacatctctgttgttggcaatataaataatgattaatcatttatgatgtaactaaggagatgaaggatatgaatcaacaattaattgaaactttaaaatctaaagaaggcaaaatgattgagatcagacgttatttacatcagcatccagaattatcttttcatgaagatgaaacggcgaaatacatcgctgaattttacaaaggtaaagatgtggaagtagaaacgaatgtcggaccacgtggaattaaagtaacgattgattcagggaaacctggtaaaacattagcaatccgtgcagactttgacgcattacccattactgaagatacaggattatcttttgcatcacaaaataaaggtgttatgcacgcatgtggtcacgatgcacatacagcatacatgcttgtattagcagagacgcttgctgaaatgaaagatagttttacaggaaaagtcgttgtgatacatcaaccagctgaagaagtaccaccaggtggtgctaaaacaatgattgaaaatggtgtattagacggtgttgatcatgtattaggtgtacacgtcatgagcacaatgaaaacaggtaaagtgtattacagacctggttatgttcaaacaggacgcgcattcttcaaattgaaagttcaaggtaaaggtggtcatggttcatcaccacatatggccaatgatgccattgttgcaggtagctacttcgtcacagcgttacaaacagttgtatctagacgactaagtccatttgaaaccggtgttgtcacaatcggttcatttgacggtaaaggtcaattcaatgtcattaaagatgttgttgaaattgaaggtgatgtacgtggattaacagatgctacaaaagcaacaattgaaaaagaaattaaacgtttatcaaaaggattagaggatatgtatggtgtaacttgcaccttagaatataacgatgattatccagcattatataatgatccagagtttactgagtacgtggctaagacgttgaaagaagcaaaccttgattttggtgttgaaatgtgtgaaccacaaccaccttcagaagactttgcatattatgctaaagaacgcccaagtgcctttatttatacaggtgcagcggtggaaaatggtgaaatttacccacatcatcatcctaaatttaacatttcagaaaaatcattacttatttctgcagaagcagtagggacagttgttttagattaccttaaaggagataactaacatgaatgaaacgtatcgcgggggcaacaagttaatcttaggtattgtattaggtgttattacattttggttgtttgcacaatcacttgtaaatgttgtaccgaatttacaacaaagttttggtacagacatggggacaattagtattgcggtcagtctaactgcactattttcaggcatgtttgttgttggagcaggtggtctggcagataaaattgggcgcgtgaaaatgacgaatatcggtttattattaagtattattggttcagcattaattattattacgaatttaccggcattattaattttaggtcgtgttatacaaggtgtatcagcagcgtgtattatgccttctacattggccattatgaaaacttattatcagggtgctgaacgtcagcgtgccttaagttattggtctatcggttcttggggtggcagtggtatctgttcactcttcggtggtgcagttgcgacaactatgggttggagatggattttcatcttctcaattatcgttgccgtactttcaatgttactcatcaaagggacgcctgaaacgaaatcagaaattaccaatacacataaatttgacgttgcagggctaattgttctagtagttatgttgctaagtttaaacgttgtcattactaaaggtgcagcacttggttacacatcattatggttctttggtttgattgcaatcgtaattgtagcattctttattttcttaaatgttgagaaaaaagtagataatccacttattgattttaaattatttgaaaataaaccatatacaggtgcaacgatttcgaacttcttattaaacggtgttgcaggtacattaattgtagcgaatacattcgtgcaacaaggtttaggttatacagcattgcaggcaggatacttatcaattacttatttaatcatggtgttattgatgattcgagttggtgaaaaattattacaaaaaatgggttctaagcgaccaatgttattaggtacattcattgtggtcattggtattgcacttatttcattagtattcttaccaggcatattttatgttatcagttgtgtcgtaggatatttatgtttcggactaggcttaggtatttatgcaacaccttctacagatacagctatttcgaatgcaccgttagataaagttggcgttgcttcaggtatttataaaatggcttcatcacttggtggcgcattcggtgtcgcaattagtggtgctgtatatgctggtgcagttgctgcaacgagcattcatacaggtgcgatgattgcactttgggttaacgtattaatgggaatcatggcatttatcgcaattttattcgcgattcctaatgatgataaacgtgtcaaagatgcgaaataataacgatgacacgccaagtgttttgataatgatataaatgaaagtaaagcaaattaaatgaggaaatgtatagagcagtgcatatagataaatctatgattggattaacactaatataaatataaatgaaaatgaaaaaccatccacttaaatttttgataagttaggtggatggttatttattgcgttgttctaaaaatttggacatttatatggaaagaactatatataatgtgaaggttatggcaattcgcttcaatgaaggcgacgtgtaaaagtgtatattaaacgtttcggggtcagactccgagaacagtgtccgtcatgcttaccgcatactaatgaagcattattatatcagtgtttatagccgatttaagataataaattttgctaaacaaaaaagccaacccatgaatgttggattggctttttacatgcatctgaatctctaattttaaaaaaatatgaatataaataagacagtaaaaattaaatttcagttgttgcaatttcttcatctgtaggtacatcatcgttaaggccaacaagtgcttcagaaacatttcgtgaatgataaccgatacgttcaagaacaccaatcatatcgatatatagtaatccgccttttgttgtacattcaccacgattaaggcgtttaatatgacctttgcgtagtttatgttcaatattaaatgattctctactacgttctacaatttcatcttttttcgttttgtcataaacatctaacatgtcgatggctttatcaaatgactcagcaacatggttgaataatttatccataccgcgttgtgcatcttctgtaatgcgaatatcttcatcatgttggcgttttaattgagcgacatactcttctgttagctctgctacttttaaaatagagcgattgacatcaaacataactgctaaacgctcaacgtctgccttcgtaatggcttttgtagaaattctaactaaataatttcgaatgctatcattgattgtttcaacagcttgatgcttttgttcaagctttttgatcaattttttatcgtcttttgtaatttcgcgaatgtcttcaaacattgataagacaatctgacccacattttgtaattctttttgagtttcttgtaatgcaacaccaggtgcgtgataaacaagatctttgtttaagtgctgaggtttatagtcatcagcaatatctttacctgggacaagctttgtaacaatccatgctaaacctgctacaaatggtaattgaatcaaagtatttgttatgttgaagataccatgtgatactgcaatcgtcatcgctggttttaagtgccataaatcttgtaacaaactaatcaaatgaatcacaactggcaagaaaattgtgaagataattaccccgattaagttaaagatgacgtgtacaagcgccgcacgttttgcagcgattgagccggctaaactagctaagatagctgtaatcgtggtaccaatgttatcgcctagtaacacagggattgctgcgtttaagctaattaaatcttgttgataaaattcttgtaaaataccaatcgtcgcacttgaactttgaactagtgctgttaaccctgcgccgacaatgacagcgagtattggatttgtagacatatcaagcattaattgcttaaatccatctaatgatgctaaaggtttaacggcatcacccataaattctagaccgaagaatagtgaaccgaaaccgaatagtatgcggccaatgttattgattttagagcgtttaaagaaaaagattaagaatgcacctaatgctaaaattggcattgcatattcgcctaaatctataccgataataaatgcagttaccgttgttccgatattagcacccattatcactccaatggcttgtttcaatgtcataaatccagctgttaccagtccgattgtgataactgtcgtacctgaactactttgtattaaaatagttacaacgatacctgcaataacacctaatactggatttgatgtaaatttgtttaaaatatctcgtagcctgtctcctgctgatgcttgaagcccgtctcccatgatttttaagccgtaaaggaaaatacctaaaccacctaaaaaggagaaaatgacttctgtaaccgacatttccattatttcacctcaaataagctttatatttagattatcgcttataattgtaaatttaatgttaagattaggtaaaattatttaacaatatatgttatttgtatatgacttgtaaaatatcgtcacttattatgtaaattttcagtgtgaaatggcaggtttgcaatcacttgtttaacaaaatgatgcaatcaatcatgtaattatgtttcatcaaaaaaatcatgagagtggaacaacgaaataatttttatgaaaacatcatttctgtcccagtctcatgatttgaaatcaccaaataaaaatctattaatggttttcgttataacaatttgtgttcttttaataatgactcaatgtacgtaccttttatctttttaaggaatcctgctaatgcgagtttttgcattttcgaatctttagtaatctcacgcaaatcttggtggtcattcagttcgtatatggcatccattaagacgcgaagatcaaatggactattgatgacttctggaataccacgatctatatttagtaattgataaacagcttccatggcagtacgaaccgaatattctgttgtaaatacagtgtctcgctctgtttctgcaaagttaccaataaatgctaagttctgagattgatgcgggacgactaaaggtctgtcgccgatagcacgcgtcatgaaataagatgtgatatatggcatataaacaggaatcgtattagatgcatgttttgctaagtcttcaattttgtcagttgatacacctaagtgatacagccattcttggcatatttcattaccactacattctgtaattggctttttaatataatcgccgtttacatctgaatataaggcataaatccatgtagatatttcattttcaggttggtctttaaactgttgctgacgattgattgtaaaactcatttgccatgcagaatcattgattgtaataataccgcctgtaactgttttgcctgcaagtgggtcacgtttacaaatactttctattgtatcgataatctctttattgtttgttgtagaagttgctgaaacaaaccaactttttttaggaatattttggcaaaacttatcaggattaccaaattcaggactttgtcgcgctaaatttttccatagtgtccaactaccacctaattcgtcagttggtggcgctggtgtatcattatcaccataagtagagctttctgtaatactaccgtttgtcacaaagacaagatcgtttatagtcagtttaatagattctgcattaccattacggtcaattaatatttctcgggcaattttttgacttgtcgtaacatctattttaatatcttcgacttttacatcgtattcaaattgaaccccatgcgattttaaatattcaaccataggtaatactaaagattcatattgattatatttagtgaattttaaagctgaaaagtctgcgagaccactaatatgatgaacgaatcgcattagatagcgacgcatttccattgcagaatgccacggttcaaatgcaaacatcgttttccagtaaatccaaaagtttgaattaaagaagtcatcggaaaatacatctgttattttgacatcatctaaatcttcttcattcgttaagcataaatctaaaatttctttaatcgccgttttagtcaaagtgaagtctccgtctgtgactaaacgttgaccctgtttctcaataacacgacagcgagaatagttagggtcttctttgtttagccaatagaactcatctaatacagacgcgttatcgatttctaatgaagggatagatctgaataagtcccacaaacattcaaagtggttctccatttcacgaccaccgcggacaacatagccttttaaaggcatattttcaccatcaagactaccacctgctttaggtaactcttctaaaatatgaatcttcgaaccttccatttgaccatcccttattaaaaaacaagctgcagcaagtgaagctagaccagatccgattaagtaagcggatttgttttctacattttcaggttttttagggcgcgcaaatgcttcataatttccataactgtaatacatatccaccaagtcctttcgtattagaatacactcagactatacccctttgtgaattgcaaatattagtatttatattggtaaatttgacgaaattagatcatttttatatttttgatttttaaaattttatcactcgaatgtttttggattctgaggtgcgggacttggaataattatgtattttgaaagaagttacttaaactaacgcctagtagagtgataattccgcctataatagcaagggttgttggtagctcgtctaataacagataagataataataaagaaacgataggtgttaaataaagagacattgttgcatcagagacaccaactgacttcacaatataagcaagcaaaacgtatggaattatagtagggaatatagctaaataaagtaccgatactattgatgtaaaagtggcgccgtgtatatcgttgatgatttcaggaataaaaataagcataaatggtgagcttgccattattgtatatagtgtgaaagcgatgaagccgtatttttctatgtattttttctggaaagtaaaatacaaactttcactaaaagatgcaagtaaaataataaaaacacctaatacattaatagttgtgtaatcatctttacttattgaaataatggatattcctataaatgcgacgagtgaacttaaccaattccattttgaaaaatgctcttttaaaaatatataagctaaagcactagaaaaaataggcgttgtagagactagaattccagatatacctgcactaatcaaagcttcaccaaaatttaaagctgtgtgatatatcacaaatccacaaaatcctaaaataaaaataacagggatatctcttagttcaggggtaggcaatttctttataattacgaacggcaagagaattattgttgctaaaattaaacgaaatgccgacaatgattctgcactaaaatcatttaacgcaatctttatcattggaaatgcagatccccacaatatgatagtaaataaatatgatagaaaagtagtgtcttgaagtttattcattaatatcatcactcctttaattatgtgtttctatattaaaaaatatgatttaaaatgagtacaaccaattttgaatggatttacctatccaattttaaaagggagggagaagatggctaaatataaagatattgctagtgacataagagataaaataatcacaggggattggttttatggaatgaaaataccttcacataggcagttggcgatacagtacaacgtaaatagagtaacgattattaaaagtattgagttattagaagctgaaggatttatctatactaaagtaggtagtggaacatatgttaatgactatttgaatgaagcacatattacaaataagtggtctgaaatgatgttatggtcctctcaacaaagaagtcagtatacggtgcaattaattaataaaattgagacagatgattcgtatatacatataagtaaaggtgaattgggtatatcgttaatgccacatattcaattgaaaaaagccatgtctaatacagccagtcatattgaagacttatcttttggttataataatggctatggttatatcaagttaagagatattatcgttgaacgaatgtcaaagcaaggtataaatgtaggtagagaaaatgtaatgatcacttcaggcgctttacatgccattcaacttttatctattgggtttttaggtcaagatgccataataatttcgaatacaccatcatatattcactctacaaatgtttttgagcaattgaattttagacatattgatgttccttataatcaaattaatgaaattgataccatcattgatagatttattaattttaaaaataaagcgatttatatagaacctaggtttaataacccgacaggtcgttctttaacgaatgagcaaaagaaaaatataattacttatagcgaaagacataatattcctatcattgaagatgatatctttagagatattttctttagcgatccaactccttctatcaaaacttatgataaattgggaaaagttatacatataagcagtttttcaaaaacgattgcaccagcaataagaataggttggattgttgcttctgaaaaaataatagagcaattggcagatgtaagaatgcaaattgactatggatccagtattttgtcacaaatggttgtatatgagatgttgaaaaataagtcttatgataaacacttagtaaagttaaggtatgttttaaaagataaacgagactttatgttaaacatcctcaataatttatttaaggatatagcacattgggaggttccaagtggaggttattttgtatggttagtctttaaaatagatatagatattaaatatttattttacgaattgttaagtaaagaaaaaatattaatcaatccgggttacatttatggcagtaaagaaaagagtataaggctatcttttgcctttgaatcaaatgaaaatattaagcatgcgctctataaaatttatacatatgtgaaaaaggtttaattaaaacaataattcgaatcattatgtggcatgttaaacagctaaatataagctatgcacatttaacaagcggatactcctgacgcaattatagtatcattacatattgtttaatcgtttggggtaatgtaattaaaaggtaaaataggcagagtgttatacataaaatgtaaagaaagaggcgatagaatgtctaaaatcaggtcttttacaatattaagtctacttatttacttagctatgatgtgctatacagtagtgacctatccaaaattaccaaccaaagtgcctattcattataatttagcaggggatgctgataattttgctgataaatgggtgctgcttttgattaatagcgcatttatagtgatttggcttatatttttcattgcaggtagatactatgaacgatttgccaaatggtcacattataatcatacaccacgtgaaattcgagcgattaaattatttttaagtacgttaaatttagagattatgagctatatgtctatcttcacagtattagaaatttggcaaatacaacaccatcatcaattcaatttactatggtttaatatgatatttatcattatcattggtttgacgcttgtcatattttgtttacttcctacaattcataaaatgagagattctcaataaaaatataaactctcatgatgcagttttgaagcgaattcctgagattattataaataatatctagtatttataattaaaatgatatattatttattatagttaaatattgtgtatattttgtgaactttttgtaaaaattcgattgcctgtcacatataggagtgttacattttaaatatgtgatcatcgcaaaatataagttgaaataggttgtagattaatcagaatgataaatattttatataaagagagggagtcattatgacactacttactgtaaatccattcgataatgtcggattatcagccttagttgcagcagtacctattattttatttttattatgcttaaccgtttttaaaatgaaaggcatttatgcagcattgacaactttggttgttacattgattgtggctttatttgtatttgaattaccagcgcgtgtatcagcaggtgcgattacagaaggcgttgttgccggtattttcccaataggatatatcgttttaatggcagtttggttatataaagtttctattaaaacaggacaattttctattattcaagatagtattgcaagtatttcagtggaccaaagaatccaactattattaattggattttgtttcaacgcatttttagaaggtgcagcaggatttggtgtgccaattgcgatttgtgcagtattattaattcaacttggatttgaaccattaaaagcagcgatgttatgtttaattgctaatggtgcggcgggtgcctttggtgcaattggtttaccagttagtattattgatacgtttaacttaagtggaggcgttacaacattagatgttgcgagatactcagcattaacacttccaattttaaactttattattccatttgttttagtattcattgtagatggtatgaaaggtattaaagaaattttacctgtcattttaacagtgagtggtacatatactggattacaattattattaacaatattccatggtccagaactagcagacattattccatcactagcaacaatggtggtgttagcatttgtttgtcgtaaatttaaaccgaaaaacattttcagattggaagcgtctgaacataaaattcaaaaacgaacgcctaaagaaattgtctttgcttggagtccgttcgtaattttaactgcctttgtattagtatggagtgcaccattcttcaaaaaattattccaacctggaggtgcacttgaaagtttagtaataaaattgccaattccaaatactgtgagtgatttatcgcctaaaggaattgcgttgcgtctcgatttaattggtgcaactgggacagcgattttattaacagtaattattacaattttaattacgaagttaaaatggaaaagtgcaggtgctttattggtcgaagcaattaaagaattatggttaccgatccttacaatttcagctatcctagctattgctaaagttatgacatacggtggtttgactgtagcaattggacaaggtattgctaaagcgggagcaattttcccattattctctccagtattaggttggattggtgtgtttatgactggttcagttgtaaataacaatactttattcgcacctattcaagcgacagtggcacaacaaatttcaacaagcggttcattacttgtggcagctaacactgcaggtggtgtagcagcgaaacttatttcaccacaatcaattgccattgcgactgcagctgttaaaaaagttggtgaagaatctgcattattaaaaatgacgttaaaatacagtattatatttgttgcttttatttgtgtttggacgtttatactaacgttaatattctaaatataaataatgttgtcacttggattcaaatgacattttaaatctaattattcatgaatcgaactagtacgaaatgcaatgagcatcttgtctagttcgattttttaatgcctaaaaatgtcatatatgtaatcagagtagaaagtgttgaggcgtttcagaagttgtttagaaaagtaagtaaaataaaaaatgcactgagcaacaaaagatgttgctcgtgcatttagatgattcttatcatttcaaataagaatgtgttaatcaacgtatataagttaaaattggtttggataaaatgatatctatcgttgtgtattgtttgtttttatagttcgcgacgacgtccagctaataacgctgcacctaaggctaatgataatccaccaaatacagttgtaccgatgaatggattttcttcaccagtttctggtaatgcttgagctttgttagcatctgcatggtttgctggttgcttcttatcaacaacaagttcttgaccaggtttgatcatgtttttatcagctaatttgttatctgcagcaattttgtcagcagtagtgccgtttgcttttgcaatgtcatttactgtatcaccaggtttaacgacatgtactccgttaccatcttctttaccaggtttgttgccatcttctttgccaggcttgttgccgtcttctttaccaggttttttgttgtcttctttaccaggcttgttgccgtcttctttgccaggcttgttgttgtcttctttaccaggcttgttgttgtcttctttgccaggcttgttattgtcttctttgccaggcttgttattgtcttcctcttttggtgcttgagcatcgtttagctttttagcttctgctaaaatttctttgctcactgaaggatcgtctttaaggctttggatgaagccgttacgttgttcttcagttaagttaggtaaatgtaaaatttcatagaaagcattttgttgttctttgttgaatttgttgtcagcttttggtgcttgagcatcatttagctttttagcttctgctaaaaggttagcgctttggcttgggtcatcttttaggctttggatgaaaccattgcgttgttcttcgtttaagttaggtaaatgtaagatttcatagaaagcattttgttgttctttgttgaatttgttatccgctttcggtgcttgagattcatttaactttttagcttctgacaataggttagcactttggcttgggtcatcttttaagctttggatgaaaccattgcgttgttcttcgtttaagttaggcatattcaagatttcatagaaagcattttgttgttctttgttgaaattgttatcagctttcggtgcttgagattcgtttaattttttagcttcacctaaaacgttagtgctttggcttgggtcgtctttaagactttgaatgaagccgttacgttgcgcttcgtttaagttaggcatgttcaagatttcatagaaggcgctttgttgatctttgttgaagttattttgttgcgcatcagcttttggagcttgagagtcattaagtttttgagcttcacctaaaacgttagcactttggcttggatcatctttaaggctttggataaaaccattgcgttgatcagcatttaagttaggcatatttaagacttgataaaaagcattttgttgagcttcatcgtgttgcgcagcatttgcagcaggtgttacgccaccagatataagtaatgtacctaaagttacagatgcaatacctacacctagtttacgaattgaataaatgtttttctttttcaaattaataccccctgtatgtatttgtaaagtcatcataatataacgaattatgtattgcaatactaaaatctatatttataattaaatttaaaggtaagttttacaacttataaaataaatattttgctgaaagatttattcaggaagtaaaaggcttaaaaccgcaaaatcacgctatttcgattaataaaaacagataaaatatagagatattttttataatgaaagcggtttaatacatatgagttaaaaaatatttttaagaataaagtggggctttgaatgtgctgaggtttaatttcggaaatggttttaagtgatatagaaaatagaaagttgttcattatgtgctgaggttttattaaaaaatagaaaacacaagtgcactttagaatacagcacacttgcgtaatagagatattattcaaaaacaagatgtaaatgatctttatctgctaataattgattcacttgagctaataattgttcagcatggtcttgctgcgcgtcatccatatgaattaaaatttttctttcatcttcagttgagcgttcttttattagatagccttgcttttttaaattattgagagctctaacagtttgagggtatttatggtggattgtttcaattaaatctttaagaagaacgatgtttttattttgagaagtgataatagctagaattgtgaattctacaaaacttaatgttagatgttttttgataatattcttgaaatacattgtatacatcatcaagtttagaaattctttactatcttttggtatcatctgtgattcactttgatctgcaaggttaaattgtttaatgatttgatcaaacaatgtaacacgttctgcaattttctctcgttgttcttcagatattgaaatgtaagtattacgctcatcaattttacttcgaactttactaatatatgaatgtttcacaagtacttttatatgctgtactaaatccgattgtttataacataaatctgaaacaatcttcttaaatggaagtgtgttttcttgttgatgaaataaataagtcagtaatataaattcttttatagtcatatcgacttcaggcttgacttttttcttaaaacgaaacatatatgcttcaatgattataaaatctctaattttgtcatggttattatatttcattgttttatctccttgtatatgcactttattttaatataacacaatataataagaaaaataatccataatttacaattaaaaataatatgatatttttattaaaatttgtgtttttgaataaatgacattatcaaacactatatttaaataagaaatagttatcgatatttgaaaaatcgaagaatattgattgatattatagaatatgagtcggtgttatttgtatataaagtattaatatgtaattaagaaagtcgacgattgttaacaataacaacaactatatgtataaaaaaacctcgcaacggttagttaactgaatcatttagctaacttcgttgtgaggtcattttgttttaataatatcgttataactttttcacggttaataataagtatatgaagaatggggcaccaaaagcagcaataaatacacctgctggcacttctttaggcaagaataaggtacgcccaattaagtctgcaataacaattgatatggcaccaatcattgctgacattagtaactttttagcataacttccgcgaacgattgttttcgcgatatgtggtgcgattaaaccgacaaacccaatgttacctactaaactgattgccatagatacgagtatagtagaagtgattaattggattagtttcatacgttgtacatgtaagcctaagccaatcgctacagggtcatcaagtatagatattttcatttttggtataacaagaaataacaacggcacaacagctaaaataaccatacccaaaatgattgtatctttaaacgtagcaccgtaaagacttccgactagccatgtataagctttggcagcagataattgcttcgttgtaatgagtaatccttggacaagcgcaataaacaacgtttgcatcgaaataccgatgattatgagtgttgtcgggcgtatttgtcctttcgtttgaaacactaatagtatcatcattgcaactgcgccacctaatactgcaaatagtggaagtaaatgtattgttaaatggctgaaaaatgcaataaagacaacagcacttaagctagcaccacctgtgataccgataatatcaggtgaggcaattggattttttaatacattttgcaacattaaaccactcattcctagtgcggcacctgctaaaatcgcaagtgtaatgcgaggtaagcgtaatacttctaaagtgaattgatccatactgtcatttggatttataaagtacatcagtacgcgttgtaatggtataaagcttgaaccaatcatcatacttaccactgaaacgatggctaaaaagattaacgcgaagatgagatggtaattgtcttttttattaatcttttcggtcataagcgttgacgtcctttcttcataatatagattaagacaatagcgccaatgacagcggtaacgacaccgataggcaactctagtggcttaattattatacgagcaacaatgtctgaaatgatcattaggattgctccagctaatgcagtaaaaggaattaaatacttatagtttggtggtaataatcgtttgctaatattcggtacgataagacccacaaagacgattgatccagctacggctaccgaaataccggctaacatactgatgagcataataatcatccatttgattaattttatgttttgaccgaggccggttgcaatgtcgtcacttgtcatcaagatgttgatgtgtgcagccatgctaaatgcaattaaaataagtatcaatacaagcggaataatccatgggatatcccaaatattacgtaatgaaacggagccacttaaccaaaataataggccttgtaagtctgtttcgttcataataagtatgccttgagtaaaggctgtaaatagcatcgcaatcgcagcacctgccaaaatgacacggtgaggtgagaatagtgtttgtctaaacatacctagtgcaacaactaatacagtaacaacaatagcccccaaaaatgcaataactacaatcattttaaaagattgaatttggataaatgtaatactaaaaatgacaaaaaatactgcgcctgcattgacaccgaaaagccctggtgaggctattgggtttcgtgtaagtgcttgcatcaacaaacctgagacagcaagggcagcaccagtcaataacgcaatgattgttctcgacgcccgtgcaccagtgacaacatcatgtaaatcgttttcactatcaaagttgaataacgcctgtatcaccgtacctggtgacacaagcgtatttccaatcattaaacttaagatagctactattgcaagacataaaccagcaataacgatttggtattttggtttaagtagcatcgtaaaactccttaattattttgattgtttttcaatatttaacttttcatataaatcgtcaataagttttaatgaagatttatatccgccagctaagttccaagtgatttcatctaaatcatcagatacttggttgtttttaactgcgtctaaatttttccactctttacttgaagtccattcgctttcagtctttttaactaatgcagcatctttcgcatttggatctgattttactacaaaaatatgatcagcgttcattaatggaatgctttctttagatgtaagttggataatatctttaccattatcaacttgtttttgtaagtctttattacgtttgaatcctaaatcatttaagatttcaccagcatatccaccagcataaattcttgtatgatcagcacggaagttaacaactgaagctttcaatggccatgcatctttatactttgcttttgcatctttttggaatgcagctactttatcatcgtactttttaagtaaatcttcagcttctttttctttccctaaagctttccccattaacttagttgtatctttgaatttgaaaactgtatcagtagaaactgttggtgcgattttagataattgatcgtaaactttttcatttctaacttttgacgcgacaattaagtccggttttaatttagagatttcctctaagttaggtgcaggttcttgacctacaatcttagtatcttttaaatcattttttatgtattcgaatttcggtttttgtgtccatgattctacagcacctacaggtttaacacctaaagatacagcgacgtcagtggcaccttgatatagcgtaacaacacgctttggtttccctttaatttcagttgtacccattgcatgtttaattgaagttgtttccttatctttgttatcagatgattgtttatttgaattcccactacatcctgctaaaacaagtaggaaagcaagcgtaacaacaagcattttaattactttattcattgactaattagcctccttcgtgatgtatgacaatgagaatcattatcacgatttagtatgaattaaattttttcctaagtcaataaaatatttatgatttacatgcaacttataattatttgacatataaatgcataaaaaatataatcctaattacttgatagtgagaatcattatcaattaggtaacacacaatattatagaattttaaatttgaggaggaagcgcttttgattgaaaaaagtcaagcatgtcacgattcattgttagattctgtagggcaaacacctatggttcaacttcatcaactatttccgaaacatgaagtgtttgcaaagttagagtatatgaatcctggaggcagcatgaaagatcgacctgccaagtacatcattgaacatggtattaaacatggtttaatcactgagaatacacatttaattgaaagtacttctggtaatttaggcattgcgttggcaatgatagctaaaatcaagggattaaaactcacgtgtgttgttgatcctaaaatatcaccaacaaatttgaaaattattaaaagttatggtgccaatgtagaaatggttgaagaacctgatgcacatgggggttatttaatgactcgtattgcaaaggtgcaagaactgttagccactattgacgatgcatattggattaatcaatatgcgaatgagttaaattggcaatcccattatcatggtgcaggcacagagattgttgaaacaattaagcaacctatagattattttgtcgcgccagtcagcacgacaggtagcattatgggtatgagtagaaaaataaaagaagtgcatccaaacgcacaaattgttgctgttgatgcgaaagggtcagtcatttttggtgacaaacctattaatagagaattacctggtatcggtgctagtcgtgtacccgaaatattgaatagatcagaaattaatcaagtgatccatgtagatgattatcaatctgctttgggctgtcgaaaactgattgattatgaaggcatatttgccggaggttcaacaggttcgattattgcagcgattgagcagttgataacgtcaattgaagaaggtgcaacaattgtcacgattttaccagatcgaggcgatcgttacttagatttagtttattcagatacatggttagaaaaaatgaaatcaagacaaggagttaaatcagaatgaatagagagatgttgtatttaaatagatcagatattgaacaagcgggaggtaatcattcacaagtttatgtggacgcattaacagaagcattaacagcccatgcgcacaatgattttgtacaaccgcttaagccgtatttaagacaggatcctgaaaatggacacatcgcagatcgaattattgcaatgccaagtcatatcggtggtgaacacgcaatttcaggtattaagtggataggtagtaagcacgacaatccatcgaaacgtaatatggagcgtgcaagtggcgtcattattttgaatgatccagaaacgaattatccaattgcagttatggaagcaagtttaattagtagtatgcgtactgcagcagtttcagtgattgcagcaaagcatttggctaaaaaaggatttaaagacttaacaatcattggatgcgggctaatcggagacaagcaattacaaagtatgttagagcaattcgatcatattgaacgcgtgtttgtttacgatcaattctctgaagcatgtgcacgctttgttgatagatggcaacaacagcgtccggaaattaattttattgcgacagaaaatgctaaagaagcagtatcaaatggtgaagtagtcattacatgtaccgtaacggatcaaccatacattgaatatgattggttacaaaagggtgcatttattagcaacatttctatcatggatgtgcataaagaagtctttattaaagctgacaaagtcgtagtagatgactggtcacaatgtaatcgagaaaagaaaactattaaccaattggtgttagaaggtaaattcagcaaagaagctcttcatgctgaactaggacaacttgtgacaggtgacataccaggacgtgaagacgatgatgagatcatattacttaatccgatgggtatggctatcgaagatatttcaagtgcttattttatttatcaacaggcacaacaacaaaatattgggacaacattgaacctatattaagaatgcgaggtgtctgaacattgcagaatcatacagcagtcaatacagcacaagcgataatattaagagatttagttgatgcattattatttgaagatatagccggaattgtatcgaatagtgagattactaaagaaaacggacaaacgcttttgatatacgaacgtgaaacacaacaaataaagatacctgtttattttagtgctttaaatatgtttcgttacgaaagttcacaaccaattacgatagagggaagggtgtctaagcaacctttaacggcagctgaattttggcaaacaattgctaatatgaattgtgatctaagtcatgaatgggaagtggctcgcgttgaagaaggactgactactgctgccacacagcttgctaaacaattatcagaattagatttagcgtcacatccttttgtgatgtcagagcagtttgcaagtttaaaagatcgtccatttcatccattagctaaagaaaaaagaggattaagagaagcggattatcaagtgtatcaagctgaattaaatcaatcatttcctttaatggttgcagcagttaaaaagacacatatgattcatggcgatactgcaaatatcgatgaattagaaaatttgacagtacctataaaagaacaagcgacagacatgttaaatgatcaagggttatcaatagatgactatgtactatttccggtacatccttggcaatatcagcatattctgccgaacgtctttgcgaaagagattagtgaaaagttggttgtactattaccgttaaaatttggagattatctgtcgtcttcaagtatgcgttcattaattgatattggcgcaccgtataaccatgtcaaagtaccatttgcaatgcagtcattaggcgcattaaggctaacgcctacgcgttacatgaaaaacggagaacaagcagaacaattattacgtcagcttatagaaaaagatgaagcactagctaagtatgtcatggtttgtgatgaaacagcttggtggtcatatatgggtcaagataatgatattttcaaagatcaattaggtcatctaactgttcagctaagaaagtatcccgaagtgctagccaaaaatgatacgcaacagctagtgtcaatggcagcactcgcggcaaatgatcgcactttatatcaaatgatttgtggaaaagataatatttctaaaaatgatgtcatgacgttatttgaagatatcgcgcaagtctttttaaaggtaacactatcatttatgcaatacggcgcattaccagagttgcatggtcaaaatatattgttgtcatttgaagatggacgtgtacaaaaatgcgtgttacgtgatcatgatactgtcagaatttataaaccatggctaacagcacatcagctttcattgccgaagtatgtcgtcagagaagatacacctaatacgctaattaatgaggatttggaaacattctttgcttattttcaaacattagctgtatcggtaaatctatatgccattattgatgcaattcaagatttatttggtgtaagtgagcatgaacttatgtcgttgttaaaacaaattttaaaaaatgaagtggcaactatttcctgggttacaactgatcagctagctgtcagacacattttatttgataaacagacgtggccattcaaacaaattttattaccattgctatatcaacgtgatagtggtggaggtagtatgccttcaggtttaactaccgtaccaaatccaatggtgacatatgattaatcagtctatatggcgcagtaactttcgcattttatggctcagtcagtttatagcgattgctggactgacagtacttgtgccattattgccaatttatatggcatcactacaaaatctatcagtcgtagaaatacagttgtggagtggtatagcgattgctgctccagctgtaacgacgatgatagcttcgccgatatgggggaagctaggtgataagatcagccgaaaatggatggtgttaagagcgttacttggtttggcggtatgcttatttttaatggcattgtgtacgacaccattacagtttgtacttgtgaggttattgcagggactatttggtggtgttgttgatgcatcaagtgcgtttgcgagtgcagaggcgccagctgaagatcgtggaaaggtattaggaagactgcaaagttcagtcagcgcagggtctcttgtggggccattaattggcggtgttacagcttcgatattaggttttagtgcgttactgatgagtattgccgttattacttttattgtctgtattttcggtgcattaaaattgattgaaacgacacatatgccaaaatcacaaacaccaaatattaataaaggtattcgccgttcatttcaatgtctattatgcacacaacaaacatgtcgatttattatcgttggcgttttagcaaactttgctatgtatggcatgctaactgcattatcaccacttgcttcatcagtgaatcatacagcgatagatgaccgtagtgtgattggatttttacagtccgcattttggacggcttcgatattaagcgcgcctttatggggacgctttaatgataaatcatatgttaaatcagtatatatatttgccacgattgcatgtggttgtagtgcgatactgcaaggtttagcgacgaatatagagtttttaatggctgcaagaatacttcaaggattaacatatagtgcattgattcaaagtgtcatgtttgttgtcgtgaatgcgtgtcatcaacaacttaaaggcacatttgttggaacgacgaacagtatgttagttgttggtcaaattattggcagtcttagtggcgctgccattacaagttatactacaccagctactacgtttatcgttatgggcgtagtatttgcagtaagtagtttatttttaatttgttcaaccatcactaatcaaatcaacgatcacacattaatgaaattatgggagttgaaacaaaaaagtgcaaaataaagaattaatacaacatgcagcgtatgcggctatcgaacgcattttaaatgaatattttagagaagaaaatttatatcaagtaccacctcaaaatcatcaatggtctatacaattatcagagctcgaaactttaacgggtgaatttcgctattggtctgcgatggggcatcatatgtatcatccagaggtatggcttatcgatggaaaaagtaaaaaaataacaacttataaagaagcaattgcgcgtattttgcaacatatggctcaaagtgcagataatcaaacggcagtgcaacaacatatggcgcaaattatgtctgacatcgataatagcattcatcgcacggcacgttatttgcaaagtaacacaatagactacgtagaggatcgttatatcgtttcagaacaatctttatacttaggtcatccatttcatccgactcctaagagtgcaagtgggttttcagaagcagatttagagaaatatgcacccgaatgtcatacatcattccaattgcattatttagctgtgcatcaagatgttctgctcacgcgctatgtagaaggtaaagaagatcaggttgagaaagtgttgtatcaattagcagacatagatatatcagagatacccaaagattttattttattaccaacacatccttatcaaatcaatgtgttgcgacagcatccacagtatatgcaatatagtgaacaaggtttaataaaagaccttggcgtttccggtgattcagtgtacccgacgtcttcggttagaactgtattttcaaaagcattaaacatttatttaaaattaccgatacacgttaaaatcactaattttatacgtacgaatgaccttgaacagattgaacggacaattgatgccgcgcaagttatcgcatcagtcaaagatgaggttgaaacaccccattttaaattgatgtttgaagaaggatatcgtgcattgttaccgaatccattagggcaaacagttgaacctgaaatggatttattaacaaatagtgccatgattgttcgtgaagggataccgaattaccatgctgataaagatattcatgtattggcgtcattatttgaaacgatgcctgattcaccgatgtctaagttatcacaagtgattgagcaaagtggtttagcaccagaagcatggcttgaatgttatttgaatcgtacattattgccgatattaaagctgtttagtaacacaggcattagtctagaagcacatgtacaaaatacattaattgaattaaaagatggcatacccgacgtatgctttgtcagagatcttgaaggcatttgtctatctagaacgattgctactgaaaaacagcttgtgccaaatgttgtggcagcatcaagccctgttgtatatgcacatgatgaagcatggcatcgtcttaaatattacgttgtagtaaatcacttaggacatttagtatcaactattggtaaagcgactagaaatgaagttgtgttatggcaacttgtagcgcatcgtcttatgacttggaaaaaagaatacgcgaataacgcagtatttgttgactgtgtagaagatttatatcaaacgccgaccattgcggctaaagcgaatttgatgagtaaattgaatgattgtggtgcaaaccctatttatacacatataccaaatccaatttgtcataacaaggaggtatcgtattgtgaatcaaacaattcttaatcgtgtaaagactagagtgatgcaccaactggtatcatcacttatttatgagaatattgttgtgtataaagcgtcatatcaagacggtgtcggtcattttacaatagaaggacatgattcagagtatcgttttactgctgaaaagacacatagctttgatcgtatacgtatcacatcaccaattgagcgtgtcgtaggagatgaggcagatacaacaacagactatacacaattattgagagaggttgtatttacatttcctaaaaatgatgaaaagctagaacaatttattgtcgagttattacagacagaattaaaagatacgcaaagtatgcagtatcgagaatcaaacccaccagcaacacctgagacatttaacgactatgaattttatgcgatggaagggcatcagtatcatccaagttacaaatcacgtttaggatttacgttgagtgataatttgaaatttggtcctgattttgtaccaaacgttaaactgcagtggttagctatcgacaaagataaagtagaaacgacggtatcaagaaatgttgtagttaacgaaatgttacgtcaacaagttggcgataagacttatgaacattttgtacagcagattgaagcatctggcaaacatgtaaatgatgttgagatgatacctgtacacccatggcagtttgaacatgtcatccaagttgatttggctgaagaaaggcttaatggcacagtactatggttaggggaaagtgatgagctatatcaccctcaacaatcgattcgtacgatgtcgccaatagacacgacaaaatattatttaaaggtaccaataagtataacgaacacttcaacgaaacgagtgttggcgcctcatacaattgaaaatgcagcgcaaattacggattggttaaagcagatacagcaacaagatatgtatttaaaagatgaattaaagacagtttttctaggggaagtcttaggacagtcttatttaaatacacaactttcgccttataaacaaactcaagtttatggtgcgttaggtgttatatggcgtgaaaatatatatcatatgttaatcgatgaagaggatgcgataccatttaatgcactttatgcaagtgataaggatggtgtaccattcattgaaaattggattaaacaatatggttctgaagcttggacaaagcaatttttagctgtagcgattcgtccaatgattcatatgctttattatcacggtattgcctttgaatcgcatgcacaaaatatgatgctcattcatgaaaatggttggcctacacgtattgccttaaaagatttccatgatggtgttcgttttaagcgtgagcatttaagtgaagctgcttcacacctgacattaaagccaatgccagaagcacataaaaaagtgaatagtaattcatttattgaaacagatgacgaacgtttagtacgcgactttttacatgatgcatttttctttattaatatcgccgaaatcatcttatttattgaaaagcaatatggtatcgatgaggagctgcaatggcaatgggttaaaggcatcatcgaggcgtatcaagaagcatttccagagttgaataactatcaacatttcgatttgtttgaacctacgattcaagttgaaaagttaacgacacgtcgattattaagtgactccgagttaagaattcatcatgttacaaatccattaggtgtaggaggtatcaatgatgcaacaactatctctgaaacatagattaaacaatggtgattcagtttatggcatttttaattctataccggacccattgatgatcgaggttatcgcagcaagcgggtatgactttgttgtgattgatacagaacacgtggcgattaatgatgagacactagcgcatttaattcgtgcagctgaagcagcgcatattataccaattgtacgtgtcactgcagtgatagatagagatatcattaaagtgttggatatgggtgcgagaggtattattgtgccacacgttaaagatcgtgagacagttgagcatattgtgaaattaagtcgttattacccgcaaggattaagaagtttgaatggtggtcgcatggcaagatttggacgtacaccattacttgatgcaatggagatggctaatgagcatattatggtgattgccatgatagaagatgttgaaggggttatggccattgacgatatagcacaagtcgaaggtttagacatgatagtcgaaggtgccgcagatttatcgcagtcacttggcataccatggcaaacgcgtgatgatcaagtaacatcacatgttcaacatatttttgaagttgtgaatgcacatggtaaacatttttgtgcattaccacgtgaagatgaagatattgcaaaatggcaggcacaaggtgtacaaacatttattttaggtgatgatcgcggaaaaatatatcgccatttaagtgcatctctagcgacgtctaaacagaaaggggatgaaggctaatgcgtatagttcaacctgttattgaacaattaaaagcacaatctcatccagtttgtcattatatctatgatttagtcggactggaacatcatttgcaacatattacatcgtcattgccgagtaattgtcaaatgtactatgcaatgaaagcaaatagtgaacgaaaaatcctagatacaattagtcagtatgttgaaggattcgaagttgcatctcaaggtgaaatagcaaaaggtcttgcttttaaaccagcaaatcatattatttttggtggccctggtaagacagacgaggaactaagatatgcagtaagtgaaggtgttcagcgtattcatgttgaaagtatgcatgaattacaacggctaaatgccatcttagaagatgaagataagacacaacacattttattgcgtgttaatttagcaggaccatttcccaatgcaacgttgcatatggcaggacgcccaacacaatttggtatttctgaagacgaagttgatgatgtcattgaagctgcgctcgcaatgccaaagattcatctagatggatttcattttcattctatttctaacaatttagactcgaatttacatgtcgatgtagtgaaactttattttaaaaaagcaaaggcatggtctgaaaaacatcgatttccactcaaacatatcaatcttggtggtggcataggcgttaactatgcagatttaactaaccaatttgaatgggataattttgtagaacgttttaaaacacttatcgttgagcaagaaatggaagatgtgacattgaactttgaatgtgggcgctttattgtggcacatattggttactatgtgacagaagtgctagacattaagaaagtacatggtgcttggtatgccatattaagaggaggtacgcaacaatttagactgccggtatcttggcaacataaccatccttttgacatttatcgctataaggacaatccatattcatttgaaaaagtttcaatttcgagacaggacacaacgttagtcggtcaattatgtacaccgaaagatgtctttgctagagaagtacagatagacgcaatcagtacaggcgacgttattgttttcaaatatgcaggtgcatacggatggtctatttcacatcacgatttcttaagccatccacatcctgaatttatttatttaacgcaaacaaaggaggatgaataactattgaatcatattcatgaacatttaaaattggtaccagtagataagattgatcttcacgaaacattcgaacctttaagattggaaaaaacgaaaagtagtattgaagcagatgattttatacgtcatcctattttagtgacagcgatgcaacatggtagatatatggttatagatggtgtgcatcggtatacaagtttgaaagcgttaggatgtaagaaagttccagtgcaagaaatccatgaaacacaatattcaattagtacatggcaacataaagttccatttggtgtgtggtgggaaacgttacaacaagaacatcgcttgccatggactactgagacaagacaagaagcgccatttattacaatgtgtcatggtgatacagaacaatatttgtatacaaaagatttaggcgaagcacattttcaagtatgggaaaaggttgtcgcaagttatagtggttgttgttctgtagagagaattgcacaaggtacatatccttgtctttctcaacaagatgtactcatgaagtatcagccattgagttataaggaaattgaagcggttgttcataaaggggaaactgtgccagcaggtgtgacacgctttaatatttcaggacgatgtcttaatcttcaagtaccactggcattacttaaacaagatgatgatgttgaacaactgcgcaattggaagcagtttttagcagataagtttgccaatatgagatgctatactgaaaaagtatacttggtggagcaatagttttactgtgatgttgagggaaatatgatgatttagcgtattgatagcgaaaatataataaaacaatatagtgtggagaacttttgatattttataaatattgaagttctccatttttgtattttgcatataaaaattaaataaaataaggtatattaaggtaaagtataaattttaaataaatggggaatgagtatgagctcaattataggaaaaatagcaatttggataggcatcgtagctcaaatatattttagtgtcgtttttgttaggatgatatctattaatattgctggaggatctgattacgaaacaatttttttattaggattaatattggctcttttcactgttttaccaaccatctttactgcgatttatatggaaagttactctgtaatcggaggtgcactttttattgtttatgctattattgcactgtgtttatataatttcctttcgtcaattttatggctgattggtggtattttgctgatttggaataaatactcaaaagatgaatcgacagacgaaaatgaaaaagttgatattgaaagtacagagaatcaatttgaatctaaagataaaatcactaaagaataaagagaatatttaaggtaaagtataaattttaaataaatggggaatagacatggaaaaaaatgtagaaaaatcattcataaagataggtttatattttcaaatagcttatatagtactcatggctataactttatgtgggtttgtaatttgctatggactaattttcggccttttctatttattatcaggtagcagagctgattatttaatagtaacaatagttatatcggcaataatttctatatttgtaattatactttcaatcgtacctgtcatcgtattggcatctgacttatttaaagaaaggatttcaaaaggtgtcatattaattgtattggctattatcgctttagtattatgcaactttgtatctgcaatactctggtttgtttcagccatatctattttaggtagaaaaaaattagtagctgcagcagatactaccactattcaaaaaagtaaagggaacgcaaatcaagcatcacataaagacacgtgtaaaaaggaacttgatagtcaagacatgatggaacatcctgaggttaaaaatcccacgactaaaaaccttgaaggatttaacgaagaaatacataaagatgaagctacaactaaagttgtcagtgataacacggaaccgcctattgaatcaaaagaccatgtctcgaaaaaagattgatgacaaactaatcgagagacttaaaaaaataatattcaacataagaacttttaaaacgacatttaaacgcattgccaatcactaatggtagtgcgtttaactataccttaaatatctgaatattttgttaaatggagctacctttgttgtactattcaaatgaagaggagtaaaatgtaattaaaggaaagaaatttgaggagtgatctttatgacaaacaacaaagtagcattagtaactggcggagcacaagggattggttttaaaattgcagaacgtttagtggaagatggtttcaaagtagcagttgttgatttcaatgaagaaggggcaaaagcagctgcacttaaattatcaagtgatggtacaaaagctattgctatcaaagcagatgtatcaaaccgtgatgatgtatttaacgcagtaagacaaactgccgcgcaatttggcgatttccatgtcatggttaacaatgccggccttggaccaacaacaccaatcgatacaattactgaagaacagtttaaaacagtatatggcgtgaacgttgcaggtgtgctatggggtattcaagccgcacatgaacaatttaaaaaattcaatcatggcggtaaaattatcaatgcaacatctcaagcaggcgttgagggtaacccaggcttgtctttatattgcagtacaaaattcgcagtgcgaggtttaacacaagtagccgcacaagatttagcgtctgaaggtattactgtgaatgcattcgcacctggtatcgttcaaacaccaatgatggaaagtatcgcagtggcaacagccgaagaagcaggtaaacctgaagcatggggttgggaacaatttacaagtcagattgctttgggcagagtttctcaaccagaagatgtttcaaatgtagtgagcttcttagctggtaaagactctgattacattactggacaaacaattattgtagatggtggtatgagattccgttaataatcatccactaatgataaataaatccttattgttaagtttaatcacttagcagtaaggattttttagtgcacttagaagggagtgtattggtagaaaattaataagcgaagttcttaagtgagttatgatgtcacagtctaatgcatcagttgaaagcattattagtattaacacacccaagatattataaaacatcacaaaaacaccactatctaatttatctcaataaaaattcacaaagttatctcattttatttttataaataaaaaatatcgataaaaagcttacaatactttatgtttttatgatatatttttaatgtataaatgaggtggaagatttggaaagagttttgataactggtggggctggttttattgggtcgcatttagtagatgatttacaacaagattatgatgtttatgttctagataactatagaacaggtaaacgagaaaatattaaaagtttggctgacgatcatgtgtttgaattagatattcgtgaatatgatgcagttgaacaaatcatgaagacatatcaatttgattatgttattcatttagcagcattagttagtgttgctgagtcggttgagaaacctatcttatctcaagaaataaacgtcgtagcaacattaagattgttagaaatcattaaaaaatataataatcatataaaacgttttatctttgcttcgtcagcagctgtttatggtgatcttcctgatttgcctaaaagtgatcaatcattaatcttaccattatcaccatatgcaatagataaatattacggcgaacggacgacattaaattattgttcgttatataacataccaacagcggttgttaaattttttaatgtatttgggccaagacaggatcctaagtcacaatattcaggtgtgatttcaaagatgttcgattcatttgagcataacaagccatttacattttttggtgacggactgcaaactagagattttgtatatgtatatgatgttgttcaatctgtacgcttaattatggaacacaaagatgcaattggacacggttataacattggtacaggcacttttactaatttattagaggtttatcgtattattggtgaattatatggaaaatcagtcgagcatgaatttaaagaagcacgaaaaggagatattaagcattcttatgcagatatttctaacttaaaggcattaggatttgttcctaaatatacagtagaaacaggtttaaaggattactttaattttgaggtagataatattgaagaagttacagctaaagaagtggaaatgtcgtgaaaatgacattgaagctgtccataataataagggttatgcctatcaaagaaaattagacaaactagaagaagtgagaaaaagctattacccaattaaacgtgcgattgacttaattttaagcattgttttattatttttaactttaccgattatggttatattcgccattgctatcgtcatagattcgccaggaaaccctatttatagtcaggttagagttgggaagatgggtaaattaattaaaatatacaaattacgttcgatgtgcaaaaacgcagagaaaaacggtgcgcaatgggctgataaagatgatgatcgtataacaaatgtcgggaagtttattcgtaaaacacgcattgatgaattaccacaactaattaatgttgttaaaggggaaatgagttttattggaccacgcccggaacgtccggaatttgtagaattatttagttcagaagtgataggtttcgagcaaagatgtcttgttacaccagggttaacaggacttgcgcaaattcaaggtggatatgacttaacaccgcaacaaaaactgaaatatgacatgaaatatatacataaaggtagtttaatgatggaactatatatatcaattagaacattgatggttgttattacaggggaaggctcaaggtagtcttaatttacttaataagttcaaataaaagttatattttaaagattgtgaccaattgttacagtataacgaggaatcccttgagacagtatcaaatggcattaagaaatatgtgccatcattgatttgcatggctataaatactattcatctgatgagatagccatgttaagaaattgaaagtatagcattaaaggggtttgtaacagttgaaaattatatattgtattactaaagcagacaatggtggtgcacaaacacatctcattcaactcgccaaccatttttgcgtacacaatgatgtttatgtcattgtaggcaatcatggaccaatgattgaacaactagatgcaagagttaatgtaattattatcgaacatttagtaggtccaattgactttaaacaagatattttagctgtcaaagtgttagcacagttattctcgaaaattaaacctgatgttatccatttacattcttccaaagctggaacggtcggacgaattgcgaagttcatttcgaaatcgaaagacacacgtatagtttttactgcacatggatgggcttttacagagggtgttaaaccagctaaaaaatttctatatttagttatcgaaaaattaatgtcacttattacagatagcattatttgtgtttcagatttcgataaacagttagcgttaaaatatcgatttaatcgattgaaattaaccacaatacataatggtattgcagatgttcccgctgttaagcaaacgctaaaaagccaatcacataacaatattggcgaagtagttggaatgttgcctaataaacaagatttacagattaatgccccgacaaagcatcaatttgttatgattgcaagatttgcttatccaaaattgccacaaaatctaatcgcggcaatagagatattgaaattacataacagtaatcatgcgcattttacatttataggcgatggacctacattaaatgattgtcagcaacaagttgtacaagctgggttagaaaatgaagtcacatttttgggcaatgtcattaatgcgagtcatttattatcacaatacgatacgtttattttaataagtaagcatgaaggtttgccaattagcattatagaagctatggctacaggtttgcctgttatagccagtcatgttggcggtatttcagaattagtagctgataatggtatatgtatgatgaacaaccaacccgaaactattgctaaagtcctggaaaaatatttaatagacagtgattacatcaaaatgagtaatcaatctagaaaacgttatttagaatgttttactgaggagaaaatgattaaagaagtggaagacgtttataatggaaaatcaacacaatagtaaattactaacattgttacttatcggtttagcggtttttattcagcaatcttcggttattgccggtgtgaatgtttctatagctgactttatcacattactaatattagtttatttactgtttttcgctaaccatttattaaaggcaaatcattttttacagtttttcattattttgtatacatatcgtatgattattacgctttgtttgctattttttgatgatttgatatttattacggttaaggaagttcttgcatctacagttaaatatgcatttgtagtcatttatttctatttagggatgatcatctttaagttaggtaatagcaaaaaagtgatcgttacctcttatattataagcagtgtgactataggtctattttgtattatagctggtttgaacaagtcccctttactaatgaaattgttatattttgatgaaatacgttcaaaaggattaatgaatgaccctaactatttcgcgatgacacagattattacattggtacttgcttacaagtatattcataattacatattcaaggtccttgcatgtggtattttgctatggtctttaactacaacggggtctaagactgcgtttatcatattaatcgtcttagccatttatttctttattaaaaagttatttagtagaaatgcggtaagtgttgtgagtatgtcagtgattatgctgatattactttgttttaccttttataatatcaactactatttattccaattaagcgaccttgatgccttaccgtcattagatcgaatggcgtctatttttgaagagggctttgcatcattaaatgatagtgggtctgagcgaagtgttgtatggataaatgccatttcagtaattaaatatacactaggttttggtgtcggattagtggattatgtacatattggctcgcaaattaatggtattttacttgttgcccataatacatatttgcagatctttgcggaatggggcattttattcggtgcattatttatcatatttatgctttatttactgtttgaattatttagatttaacatttctgggaaaaatgtaacagcaattgttgtaatgttgacgatgctgatttactttttaacagtatcatttaataactcaagatatgtcgcttttattttaggaattatcgtctttattgttcaatatgaaaagatggaaagggatcgtaatgaagagtgattcactaaaagaaaatattatttatcaagggctataccaattgattagaacgatgacaccactgattacaatacccattatttcacgtgcatttggtcccagtggtgtgggtattgtttcattttctttcaatatcgtgcaatactttttgatgattgcaagtgttggcgttcagttatattttaatagagttatcgcgaagtccgttaacgacaaacggcaattgtcacagcagttttgggatatctttgtcagtaaattatttttagcgttaacagtttttgcgatgtatatggtcgtaattactatatttattgatgattactatcttattttcctactacaaggaatctatattataggtgcagcactcgatatttcatggttttatgctggaactgaaaagtttaaaattcctagcctcagtaatattgttgcgtctggtattgtattaagtgtagttgttatttttgtcaaagatcaatcagatttatcattgtatgtatttactattgctattgtgacggtattaaaccaattacctttgtttatctatttaaaacgatacattagctttgtttcggttaattggatacacgtctggcaattgtttcgttcgtcattagcatacttattaccaaatggacagctcaacttatatactagtatttcttgcgttgttcttggtttagtaggtacataccaacaagttggtatcttttctaacgcatttaatattttaacggtcgcaatcataatgattaatacatttgatcttgtaatgattccgcgtattaccaaaatgtctatccagcaatcacatagtttaactaaaacgttagctaataatatgaatattcaattgatattaacaatacctatggtctttggtttaattgcaattatgccatcattttatttatggttctttggtgaggaattcgcatcaactgtcccattgatgaccattttagcgatacttgtattaatcattcctttaaatatgttgataagcaggcaatatttattaatagtgaataaaataagattatataatgcgtcaattactattggtgcagtgataaacctagtattatgtattattttgatatatttttatggaatttacggtgctgctattgcgcgtttaattacagagtttttcttgctcatttggcgatttattgatattactaaaatcaatgtgaagttgaatattgtaagtacgattcaatgtgtcattgctgctgttatgatgtttattgtgcttggtgtggtcaatcattatttgccccctacaatgtacgctacgctgctattaattgcgattggtatagtagtttatcttttattaatgatgactatgaaaaatcaatacgtatggcaaatattgaggcatcttcgacataaaacaatttaagtaccggtaatgctatactttagaaaattaagattaagaagaaaaggcaatttcttattgaaaaatggaagttgtcttttttaattctctttaaaagcgggaaacaaaagcagttaaatgcctttttgcattcaatattaaatattatatcaatttcgaatatttaaattttatataattggatataacaaataaataataattattgcaaaacacacccgaaattaattattataaaagtatattcataaaaggaggaatatacttatggcatttaaattaccaaatttaccatatgcatatgatgcattggaaccatatatagatcaaagaacaatggagtttcatcacgacaaacatcacaatacgtacgtgacgaaattaaacgcaacagttgaaggaacagagttagagcatcaatcactagcggatatgattgctaacttagacaaggtaccggaagcgatgaggatgtcagtccgtaataatggcggtggtcattttaaccattcattattctgggaaatactatcacctaattctgaagaaaaaggtggcgtaatagatgacatcaaagcgcagtggggcactttagatgaatttaaaaatgaatttgcaaataaagcaacaacattatttggatcaggttggacttggttagttgttaatgatggcaaattagaaattgtgacaacgccaaaccaagataatccattaacagaaggcaaaacaccaatcttactatttgatgtttgggagcatgcctactatctgaaatatcaaaataaacgtccagactatatgactgcattttggaacattgttaactggaaaaaagttgatgaattataccaagcagcaaaataatataacttaatataattgaggtggagcatctacaaggtgttccacttttttgtacttaatatctttacttatttgtttttgtgtaatgggatagcacgtaaaagtggaaaaataataagataaatttcaactcgaaataccttattattgttgactataacgatgacctaaatattatatacattagacaacactattaattaatcaacatattgacattaaataaattgacaaaataagtaattattgtgaatctaaagtgaaatttttataaaaaaatgtaatgattcaaaaattttgttgcatttcttttgtaatcgtatgataatgtaaatgtaatcaaattgtaatataaggggacaagacaatgaaaaaattagcaacagtaggttctttaattgtaacaagcactttagtattctcaagtatgccttttcaaaatgcgcatgccgacacaacttcaatgaatgtgtcgaataaacaaagccaaaatgtacaaaatcatcgtccttatggcggagtagtaccacaaggaatgacgcaagcacaatatactgaattagagaaagctttaccccaattaagcgctggcagtaatatgcaagactataatatgaaattgtatgatgcgacgcaaaatattgctgataaatacaatgtgataattacaactaatgtaggggtatttaaaccacatgctgttagagatatgaatggccatgcgttacctttaacaaaagatggcaatttttatcaaacgaatgtagatgcaaatggtgttaatcatggtggtagtgaaatggtgcaaaataaaacaggtcatatgagtcaacaaggccatatgaatcagaacacacacatgaaccaacagccacacatgcaacaaggtcatatgcaatcatcaaaccatcaaatgatgagtccaaaagcaaatatgcattcatcaaatcatcaaatgaaccaaagtaacaaaaaagttttaccagctgctggtgaaagtatgacatcaagtattcttactgcaagtattgccgcactactattagtatctgggttattcttagcatttagacgacgttcaacaaataaataaacataatacgattaataatagaaaaatcgtgtgattatctgagcgagcctaggacataaatcaatgtcctaggctcgctaatgttatattggcagtagttgactgaatgaaattgcgcttgtaacaagcttttccatttcttaccaactccctaaatagtcatcaaaaaatttcttatattttaataatttttaataatccgattgtcttatacgtgtcagtgttaattcagatatttcctgtggaatataccacttattaatcataattggataaggtgtttgtgcgtacagtgtttcaataatcagccaacaatgtgtatcaccatcaaacacgtgactatgatttttgaagtggggcgctttggtaatagacatttttaaatctgattgatatgcattgctataaatcgtttgctcaacgaatgtcttcatgtcgtcttcgttttgtgtattcactttaaatgtgtcaatgacatttaacggtataaaggtaaagcaaaatgcatcagcttgcttagaatgattgtcctttttttgataatagcgttccattgcaatgacggcagaaggatggtttgcaaacaaatgatttgtatattcactttctaaatcaacacgataattaattgatgacatagatacgcgagctagcaatatttgatcaagtggatgcttaaattgatccatacttgaagcgtgttgggcatttgtttgtggaataacaaagtgtcccttccctcttgtactctctacgatgccatcttcggctaacaattttatagcttggcgcaaagtcatacgactgacatcaaagcgcgcacaaagttccttttcagtaggtaatgcatggccactcggatattttcctatttgaatttctttatataacgtattataaatcgttaaaaattttggttgtgtttgcgtcacgtagacaacctccataaagttacttaatcactctcatcatacaataatttttactcaaattggaaaaattataaaaattaaatatagataggctttgaaaattagttttatacaaggttagtagctgtaactgtaaaatgttcttaatattgtcaaaatgtaatgcttgaaagcgcttttaaaaaatattattatatacatggttagacaaatagacaaatcactatacaaatattgggaggaatattttatgaaatcaacaccacacattaaaccaatgaatgacgtcgaaattgcagaaacggttctattgccaggagatccgttaagagctaagttcattgcagaaacttatttggatgatgtggaacagttcaatacagtgcgaaacatgtttggttttaccggaacatataaaggtaaaaaagtttctgtcatgggttcaggtatgggtatgccatctattggcatttactcttatgaattaattcatacatttggttgtaaaaaattaattcgcgttggctcttgtggcgcgatgcaagaaaacattgatttatatgatgtgattattgcacaaggtgcctctactgattcaaattacgttcaacaatatcaattaccaggtcattttgcgccaattgcttcttatcaattattagaaaaagcagttgaaacagcacgtgacaaaggtgtacgtcatcatgtaggtaatgtgttatcaagtgatattttctataacgcggatacaacagcgagtgaacgttggatgcgtatgggtattttaggtgtagaaatggaatcagctgcattatacatgaatgcaatttacgctggtgtcgaagcattaggtgtgttcacagtgagcgatcatttaattcatgaaacgtcaacaacacctgaggaaagggaacgtgcatttacagatatgattgaaattgcactgtcattggtgtagatgattatgaatgttgaatattctaaaataaagaaagcagtacctattttattattcttatttgtattcagtttggttatagacaactcatttaaattgatttctgtagccattgctgatgacttaaacatatctgtaacgacagtaagttggcaagcgacattagccggtttagtaattggtattggcgctgtagtatacgcttcattatctgatgccattagtatacgcacactatttatttatggcgtgatattaatcattatcggatcaattattggttacattttccaacatcaattcccattacttttagttggacgtattattcaaactgccggtttagctgctgcagagacattatatgtgatatatgttgcaaagtatctttctaaagaggaccagaagacttaccttggcttaagtacgagcagttattccttgtcattagttatcggtacattatcaggtggatttatttctacgtatttacactggacaaatatgtttttaattgcattaatcgtagtatttacgttgccattcctatttaaattattaccaaaagaaaataatacgaataaagctcatttagattttgttggcttaattctagtggcaactattgctacaacagtcatgctgtttattacgaactttaattggttatatatgattggtgccttaattgcgattatcgtttttgcgctatatattaaaaatgcgcaacgtccattagtaaataaatcatttttccaaaataaacgttatgcttcatttttatttatagtatttgtaatgtatgctatccaattgggttatatttttacgttcccattcataatggagcaaatttatcatctgcaactagacacaacatcactgttattagtaccgggttatatagtagcagtcattgttggtgcactaagtggtaaaatcggcgaatatctgaattcaaaacaagcgattatcacagcaattattttaatagcactgagcttgattttacctgcatttgcagtaggtaatcacatttcaatcttcgtcatttctatgatattctttgcaggtagctttgctttaatgtatgcacctttacttaacgaagccattaaaacaatagatcttaatatgacaggtgtggctattggtttttataatttaattattaatgtggcggtatctgtaggtattgcgattgctgcggctctaatcgattttaaagcattaaatttcccaggcaatgatgcattaagttcacatttcggtattattttaattattttaggtttaatgagtattgtcggattagttttattcgtcagcttaaatcgttggacacaatctgaaaaataaatagatataaattcgcgagatatattcgtatttatagtaaaattaaataaagagattatataacacgaggagtagtaagtatgaaatttgagaaatatatagatcacactttattgaagcctgagtcaacacgtacgcaaatcgatcaaatcatcgatgaagcgaaagcatacaattttaaatctgtatgtgtgaatccaacacatgttaaatatgcagcagagcgactagctgattcagaggtgctcgtttgtacggtaataggattcccattaggtgcgtcgacaactgcaacgaaagcatttgaaacagaagatgcaattcaaaatggtgcagatgaaattgacatggtcatcaacatcggcgcattaaaagatggacgttttgatgatgtacaacaagacattgaagcagtggttaaagctgcgaaaggtcacacagtaaaagtgattattgagacggtattgttggaccatgacgaaattgtaaaagcgagtgaattaacaaaaacggctggtgcggacttcgttaaaacttcaacaggttttgcaggtggcggtgcgactgcagaagacgttaaattaatgaaagatacagtaggtgctgatgtagaagtaaaagcatcaggtggcgtacgtaatttagaagatttcaataaaatggttgaagcaggtgcgacacgtattggtgcgagcgcaggtgttcaaattatgcaaggtttagaagcagattcagattactaatatatataaattttgggagtgatagctatgacaagaccatttaatcgtgtacatttaatcgtaatggattcagtaggtattggtgaagcgccagacgcagctgattttaaagatgaaggttcacatactttaagacataccttagaaggtttcgatcaaactttaccaaaccttgaaaagttaggtctagggaacatcgataaattaccagtagtaaatgcagttgaacaaccagaagcatactatactaaattgagtgaagcttcagttggtaaagatacaatgactggtcactgggaaattatgggattaaatattatgcaaccttttaaagtataccctaatggattccctgaagagttaattcaacaaattgaagaaatgacaggtcgtaaagttgttgctaacaaaccggcatcgggtacgcaaattatcgatgagtggggcgagcaccaaatgaaaactggtgacttaattgtttatacaagtgcagacccagtattgcaaattgctgcacatgaagacattatcccattagaagagttatatgatatttgtgaaaaggttcgtgagttgacaaaagaccctaaatatttaattggtcgtattatcgcacgtccatatgttggtgaaccaggaaactttacacgtacatctaatcgacatgactatgcgttaaaaccttttggtaaaactgtcttagatcatttgaaagacggtggttatgatgttattgccatcggtaaaattaatgacatttatgatggtgaaggtgtaacagaagcggttcgtacgaagagtaacatggacggtatggatcaattgatgaaaattgttaagaaagatttcacaggtattagcttcttaaacttagtagactttgatgcattatacggtcatcgtcgtgataaaccaggttatgcacaagcaattaaagatttcgatgatcgcttgccagaactgtttagcaacttaaaagaagacgatttagtaattattacagcagaccatggtaatgacccgacagcgccaggtacggaccatacgagagaatatatcccagtaattatgtacagtccgaaatttaaaggtggtcatgcactagaaagtgatactacattcagttctatcggtgcaactatagcagataatttcaacgtaacattaccagagttcggtaaaagttatttaaaggaattgaaatagaataaatttagatattataaaaacagcagtgaagttaactataacaatagttttcttcactgctgtttttattataatagagaaacgtaagacggtaggacttcttatttaggagtatcctgatttaatgttaaacaatacgttttcggattgaaccggaaattaaatcgacaattgcgaccattagtactaaaccgattaatataatacctacacggtcccaagaacgtgtttgaatggcaaatatgagtggtgtcccgataccaccagccccaattagccccagtatagaagctgaacgtaagtttagttcaaagcgataaagtatgagtgatagaaaggcaggcataatttgtggtatgactgcaaatacgagtgttttaatcttattcgcaccactggcctttaatgattctacagcactgaaatctagaccttcaatatcttcagctaaaagtttcccaagcatacctacggaatggatacctaaagctaatacacctgaaaatgaacctgggccaacagctttgataaatataagtgccattacaatttctgggaagacacgtataacacttaaaataaatttgctaacacctgaaactgggcgtagctttaccatattatttgcacctagaaatgctaatggaatacagataattgcggcgatgaaagtacctacaacggctatcgcaaaggtttcaagtaaaccacgtaataagtcttcgccatctggtatatagatatagctgatatcaggatggaataatccgctgaatatggattttaagatttctaatgatttacttttaagttctaaacttggtacacctgcaaatgcccagatgataatagctaagacgacaattgcaataagccatcttttaatcaattttcgtttgtgtgcttttgtgtgaacattatattttgctatttcctgtgtcatgcgagatgtgccctcactttcgtactgatgtaatcaatgacgacgacgataactaaagtaaataaaataatcgttgctgtttttggatattgaaataaaccaagtgtttgatcataaaacaatccaataccgccagcgccgactaatccaagcacagctgaagcacgtatatttacttcaaatgcatataatacgtatgacataaatgacgatatggcttgtggtacaacaccgaaaacaatccattttattttattagcgccaacagccgtcattgcttccattggacctggatctatcgtttccaatgattcatataataattttccaataatacagatagttaaaataaacagtgctaatatccctggaatttgaccgattccaaatacagccacaaagattgctgctaataacaaatctggaatagtacgaactatatttaaaataaagcgcgagggtattgaaatccacttttgatgaacgatattgctagcacataataacgcaattggtattgaaacgatgctacctaatactgtacttacgatagccattcgaatggtatctaacattggcgttgtaatttgttgtaaatactcgaaatcaggtggaatcatttgtttgaatagatcacctatttgaggtattcctatcattaaatctccaaaattaaatcccgtataaatgaagctccaaatgataagcacaatgattaacatgaaggtaaaactcgtttttaaagaaacctttttctttaaaagggagtcatactttgtaggtatttctaaaggcatgttagttcactcctagcttttcatcttctttaattgtacgtccatatatttcactaaatacgtcatctgttgcttcagatgcaggaccatcatagacaacttcaccatcacgtaaaccaatgatgcgtgtgccatattcttttgccaagtcaacaaaatgtaaattaattaaaattgtgatgcctaattcttggttgatttttcttaaatcatccataacctgtttcgtagttaatgggtctaatgaagcaactggttcatctgcaagaataatttcagattcttggcatagcgcacgtgcaatagatatacgttgttgttggccacctgataattcatcagagcgttgattatatttatctaagatattgacgcgttctagtgcatccattgccttaattttgtcttcttttgggaataaacctaataccattttccaagtagggtgataacctacacgtccacttagtacatttcgtaatacacttgaccgtttaactaaattaaaatgttggaaaatcatacctatatttcggcgcatttctaataatgctttaccatgggctttagtgattgatttaccttggatgaaaatttcacctgacgtgatatcatgcaaacgatttacagatcttaataacgtggatttcccagcaccagatagtccgacaataactgcaaattcacctttttcaatatttaagttaatatttttcaagcctacatgaccgttaggatagactttactgacgtttttaaattcgatttgactcatgtttgacacctttctttaataaagaaaagccaaggtaaactgaaatatcatagacattgggtttctgtgtacaaatggtttcaaatgtacagcgacacctttctatatctgtttcagtttagcgcctagcttttcaatattaatctagaatatatctattgaacgaaagcttttaataccaaattcgctaatgattcatttgttaaataatgattatttcatatctttaactaatttttcgtactctcttacaatgtcgaaatttgaatctttcgtttctgtgtatccttcatgtgaataaacttcgctaataattttgtgaccttcttttgatttagcaatgtctataaaagcttttttcaatttttcttgaaaatctttatccatatctggtcttacagaaattgtgtcattcggaatagcttgtgttaattttaaaattcgtgtgtctttaaatacatttggttggtcttttttcacagtattacgtgcatcgttaaatacagccgcagcatctacatctccatttaataatgagataactgcttggtcatgacctttaacattcacaattttcatatctttagttgcattaatacctgcttcgttttttaacatcgcaagtgggaatgtatatccagcagttgatgttacatcttgtaaggcaattttcttaccttttaaatctttcaagcttttaatttttgagtcttttttaacaagaatttctgatttataactatctacaagttctttacttgctgaaccatcttcttttacaccgaaacgttgtgcttgtaataataaatcagctgctttttgatcatgtgctaatgtgtatgccgttggtggtaagaaaccaacatcaacttttttagacttcatagcttcaacaattgtattgtagttagttgatacagacactttaactggaatccctaattctttagatagtaatttttctaatggttttgctttagcttctaatgttccagcattttgcgaaggtacaaattgaacggttaattctttaggtttgtatcctcctgatttagaatccgaatcattactagcgttcttttgattatctaaagaacttgagtttccacatgctgctgcaaaaacaatgactgctaacattaatacaaataaacacttaaaatttttcatttgataactgtccccttcacattcttaatcgtgtaatatgtatgcaatgaaattacacttatagcgtaccacatttaaatgttaaaaagtattttataaaaatgaattttaataactttctttaagagtttgataagattttgtaaatttttcgttaaattgctcatatgcaacgaatttttatcctataattcaagaacaaatttattttaaaaggagcctcacaaaatgaaaaaaatatataagtcattaactgtctctgcaattgttgcaacggtatcattaagtgctttaccgcaatctttagctataacgcatgaatcgcaacctacaaagcaacagcgaacggtattattcgatcgttctcatggtcaaacagctggtgctgcagattgggttagtgatggtgcattttcagattatgcggattcaatacaaaaacaaggttatgacgttaaagctattgatggtcattcgaacataacagaagcaagtttgaaaagttccaaaatatttgtaattcctgaggctaacattcctttcaaagaatcagaacaggcagcaattgttaaatatgtgaaacaaggtggcaatgttgtctttatttcagatcattacaatgctgaccgaaatttaaatcgtattgattcatcggaggcaatgaatggttatcgacgtggagcatatgaagatatgtcgaaaggtatgaatgcagaagaaaaaagttctactgcaatgcaaggtgtgaaaagttcagattggttatctacaaactttggcgtacgttttcgatataatgcactaggtgatttaaatacgagcaatattgtttcttcaaaagaaagtttcggtattactgaaggtgtgaaatctgtctctatgcatgccggatcgacattagcaattactaatccagagaaagcaaaaggtattgtgtatacaccagaacaattgccagcgaaaagtaaatggtcacatgctgtagatcaaggtatttataatgggggcggtaaagcagaaggcccctatgtagcaatttctaaagttggaaaaggtaaagcagcatttatcggtgattcatcacttgtggaagatagttcgcccaaatatgtaagagaagataatggagaaaagaagaaaacatatgatggttttaaagaacaagacaacggtaagctattaaataatataacggcttggatgtctaaagataatgatgggaaatcacttaaggcgagtagcctaacattagatacaaagactaagttgcttgattttgaacgaccagagcgttcaactgagcctgaaaaagagccatggtcacaaccgccgagtggttataaatggtatgatccaacaacatttaaagcaggtagttatggcagcgaaaaaggcgcagatcctcagccaaacacaccagatgatcatacaccaccaaatcagaacgaaaaagtaacatttgatatcccgcaaaatgtttctgtaaatgagccatttgaaatgacaatacatttaaaaggatttgaagcaaatcaaacacttgaaaatcttagagttggtatttacaaagaaggcggacgtcaaatcggacaattttcaagtaaagataacgattataacccaccaggttacagtactttgccaacagttaaagcagatgaaaacggaaatgtcacaattaaggtcaatgctaaagtacttgaaagtatggaaggttcaaagattcgtttaaaactcggtgacaaaaccttgattacaacagacttcaaataaatatataatagaaataagaaagatgtttgtgattgaaggagtgagtgaggatgtcaaacatagcattttatgtcgtgagtgacgtacatggttatattttcccaacagattttacgagtagaaatcaatatcaacctatgggattgttactagcgaatcatgttatagaacaagacagaaggcagtatgaccaaagttttaaaatagataatggtgattttttgcaagggtcaccattttgtaattacttaatcgcgcatagcggcagtagccagcctttagttgatttttataatcgaatggcattcgactttggtacgcttggtaatcatgaatttaattatggattaccatacttaaaagacactttacgcagactcaattatccagttttgtgcgctaatatatatgaaaatgatagtacattgactgataacggtgtgaagtattttcaggttggagatcaaactgttggtgtgataggtttaacgacacaatttattccccattgggaacaaccagagcatattcagtcacttacgtttcatagtgcttttgaaatacttcaacaatacttacctgaaatgaagcgacatgcagatatcattgtggtttgttaccatggtggatttgaaaaggatttagaaagtggtacgccgaccgaagtattaacgggtgaaaatgaaggatatgccatgttagaagcgttttctaaagatatagatatctttattacgggtcaccaacatcgacaaattgctgaaaggtttaagcaaacggctgtgattcaacctggtacgagaggtacaactgtaggcagagtagtcttgagtactgatgaatatgaaaatctatccgttgaatcatgtgaattacttcctgttatagatgattccacatttactattgatgaagatgaccaacatttacgaaagcagttagaggactggttagattacgaaattactacattgccatatgatatgacgattaatcatgcatttgaggcacgtgtggcaccgcatccttttacaaattttatgaattacgctttattagaaaaaagtgacgcagatgttgcctgtacagctttgtttgattctgctagtggtttcaagcaagtcgtgacgatgcgagatgttattaacaattacccatttccaaatacatttaaagttttagctgtaagtggtgccaaacttaaagaagccattgaacgatcagcagaatattttgacgtgaaaaatgatgaagttagtgtgagcgcagacttccttgaacccaaaccacaacactttaattatgatatatatggtggcgtaagttataccattcatgttggaagaccaaagggacaacgtgtgagcaatatgatgattcaaggtcacgcagttgatttaaagcagacatatacaatttgtgtaaataattatcgtgcagtaggcggtggtcagtatgatatgtatatcgacgcgccagttgtaaaagatattcaagttgaaggcgcacaattacttattgattttttatcaaataataatttgatgcgcatcccgcaagttgttgattttaaagttgaaaagtgacggatatatgtaaaacttacttgattttaatcgggtaagtttttgtttttgtttaaagcgagaaagtattatctttagacgacgtgattgaaatgtcacgtcctgtcaaaatgaatagtttattaaagttgtattttgatagaaatttactgacaccacaaaaattattgaattatttaaaagttgatgaaacatttttgaatcatctagcaggtattaatttaaaactctttaaggattatgttaatgaaaatagagaatataatataacgaatctatataaataaggcaccaatatttaaacctcgagctgaaaagatcatcatttcagttcgaggttttttattttatcctctttgtatgggtattcttttacttgaaatttgttttcctgtttttttattgtaaatttttattacatagtatcctaagttatatcctgacatttgttctccagtatttttagttttttagtaggaacataatggtatttttttgctgttagtggaacatattttttagtgttttgaatttcgtttcatccatttgtaaaactggatactctaatatccggtaatagccggttaaatcgacataggatgtcactagctattccaaaattgtcttttgacgctataacgattgttgggaatcttagcatgtctaacgcagagagactttcacattttatgagtactaatcctgaaattcggctttgggatattttacaaacaaactttaaagctaaagctcttaaagaaaaagtttatattgaatatgacaaaataaaagcaactctttggaatagacgtagtatgcgcgttgaatttaatcctaataagctttcgcatgatgaagtgctttggttaaaacaaaatatcatcagttatttggacgatgttagttttacgagattagatttggcttttgattttgaatttgatttaaatgactattatgcattgtcagataagtcggtaaagaaaactatattttatggacgtaatgtaaaaccagaaacaaaatattttggtgtgcgtaatagtgataggtttattcggatttataataaaaacaagaacgtaaagataatgcagatgttgaaattgattcaacatttctatggcgtgtggaaattgaattaaaacgagatatggttgattgttggaaagattgttttgatgatttgcatattttaaaaccgaatttaaaaatgattgaaaatatacaagaacgagcaatgcttcatttattaactcacgaagaagaggaatggggaaatttagaaagacgtactaaaaataaatatagagataagttgaaaaatatagcgtctattgatttgacagatttaatgaaaatatctttaagaggaaatgaaaaccaattgcaaaaacaaatcgacttttggttgaattaattattataactaaagaactatgttcacttatgctcatctacttaaaataagtatttttttgttggtttttaaaagtagttgaaatgtttataataatattgaaagatatttctgttttccttttgaataataaacttaaaagagaatataaaataatgcttattaaaattaggggtggaaatatgaaaagagatttttttgaaaagtggtcgtttattttaaatttaattttattttgtgcttttttgtttttagtggttctgatgttttataaggatgtcgatttgatttatattttttgtacattattaatatcattattacctttgctaaatattataaaaagaataggctgggaaataaatcaatcttctatgatctacgaagttatattggcagtaattgactgaacgaaaatgcgcttgtaataagcttttttcaattctagtcaggggccccaacacagagaatttcgaaaagaaattctacaggcaatgcgagttggggcggggccccaacaaagagaaattggattcccaatttctacagacaatgcaagttggggtgggacggcgaaataaattttgcgaaaatatcatttctgtcccactccccagaaaaggttctaccattgtcaaaaaaatgcatctctacatgttagagtaaatattggtcagccaaccaaaataatcaacacgaggagatgctatttaatgtcatctgacacaaacagtttagcacatacgaaatggaattgtaagtaacatattgtctttgcacctaaatacagaagacaagcgatatatggaaaaataaaaaaagatatagggattatattacgtcaattatatgaaagaaaaggtgtagagataattgaagcagaggtatgtaaagatcatatccatatgttagttagtataccacccaaacttggggtatcatcatttgttggctatttaaaaggaaaagtaatttaatgatatttgatagacatgctaacttaaagtatagatatggaaatagaaagttttggtgtaaaggattttatgtggatacagtaggtagaaataaaaaagtgattgaaaattatattcgtaatcaattacaagaggatatcgttgcagatgaaatttcaatggaagaatatttagatcctttcactggagagaaaaataaaaaaagaaagaaaaaagagtaaacctttaggattgctggaatagtagtgcagttggctgacttgtcagtgcccttttagggctggccagtaaggaaggcttatagccgcagaacaaaccacccgttcacacgggtggtttttatttgtaacatctgttgataggtatcgacaaggaccttttaatgttgtgttttgtgcgatataacaagctttttaggctattaaagaatattcagaattaaatatataattatgaataaattatgtcattgaaaaaattatgattataaaatcattctaaaaacaccgaaataacaatgatttcatgaaaacatttattttaaaatttgatatttgttcaaataatattcgaaattaaacttttttgtatagaattttctttatatcctgagagacatgtactataatgtttgtgaaataattcacaaagtataaaggagtggttgtatatgttaactatacctgaaaaagaaaatcgtggatcgaaagaacaagaagtggcaattatgattgatgctctagctgacaaagggaaaaaagcattagaagcattatctaaaaagtcacaagaagaaattgatcatattgttcatcaaatgagcttagcagctgttgatcaacatatggtgctagcaaaattagcacatgaagaaactggaagaggtatatacgaagataaagcgattaaaaatttatacgcttctgaatatatatggaattcaataaaagacaataagacagtagggattattggtgaagataaagaaaaaggattaacgtatgtagcggaaccaattggtgttatttgtggtgttacgccaacaacaaatcctacgtcgacaactatttttaaagcgatgattgcaattaagacaggaaatccaatcatttttgcattccatccaagtgcacaagaatcgtcgaagcgtgcagcagaagttgtattagaagcggcaatgaaggcaggtgcacctaaagatattattcagtggattgaagtgccttctatcgaagcaacaaaacaattaatgaatcacaaaggtattgcattagttctagcaacaggtggttcgggcatggttaagtctgcatattcaactggcaaaccggcattaggtgtgggaccaggtaacgtgccgtcttacattgaaaaaacagcacacattaaacgtgcagtaaatgatatcattggttcaaaaacatttgataatggtatgatttgtgcttctgaacaagttgtagtcattgataaagaaatttataaagatgttactaatgaatttaaagcacatcaagcatactttgttaaaaaagatgaattacaacgcttagaaaatgcaattatgaatgaacaaaaaacaggtattaagcctgatattgtcggtaaatctgcagttgaaatagctgaattagcaggtatacctgtccccgaaaatacaaaacttatcatagccgaaattagcggtgtaggttcagactatccgttatctcgtgaaaaattatctccagtattagccttagtaaaagcccaatctacaaaacaagcatttcaaatttgtgaagacacactacattttggtggattaggacacacagccgttatccatacagaagatgaaacattacaaaaagattttggactaagaatgaaagcttgtcgtgtacttgtaaatacaccatcagcggttggaggtattggtgatatgtataacgaattgattccgtctttaacattaggttgtggttcctacggtagaaactcaatttcacataatgttagtgcgacagatttattaaacattaaaacgattgctaaacgacgtaataatactcaaattttcaaggtgcctgctcaaatttattttgaagaaaatgcaatcatgagtctaacaacaatggacaagattgaaaaagtgatgattgtctgtgaccctggtatggtagaattcggttatacaaaaacagttgagaatgtattaagacaaaaaacggaacagcctcaaattaaaatatttagcgaagtcgaaccgaacccatcaactaatacagtatataaaggtctggaaatgatggttgatttccaaccggatacaatcattgcacttggtggtggttcagcgatggatgctgcaaaagcaatgtggatgttctttgaacaccctgagacatcattcttcggtgctaaacaaaagttcctagacatcggtaaacgtacttataaaataggcatgcctgaaaatgcgacgttcatttgtatccctacgacatcaggtacaggttcagaagtaacaccatttgcagttatcacagatagtgaaacaaatgtaaaatatccgttggctgattttgctttaacacctgacgttgcaattattgaccctcaatttgtgatgagtgtgccaaaaagcgttacagcagatacaggaatggatgtactaacgcatgcaatggaatcatatgtatctgtaatggcttcagactacacaagaggtttgagtctacaagcgattaaattgacgttcgaatatttaaaatcatctgttgaaaagggtgataaagtttcaagagagaaaatgcataacgcatcaactttggctggtatggcatttgcaaatgcattcttaggcattgcacactcaattgcgcataaaattggtggcgaatatggtattccgcatggtagagcgaatgcgatattactaccgcatattatccgttataatgccaaagacccgcaaaaacatgcattattccctaaatatgagttcttcagagcagatacagattatgcagatattgccaaattcttaggattaaaaggtaatacgacagaagcactcgtagaatcattagctaaagctgtctacgaattaggtcaatcagtcggaattgaaatgaatttgaaatcacaaggtgtgtctgaagaagaattaaatgagtcaattgatagaatggcagagctcgcatttgaagatcaatgtacaactgctaatcctaaagaagcactaatcagtgaaatcaaagatatcattcaaacatcatatgattataagcaataatctatctgataataatcatctaactcacctgaaattacaaaagtaaaaaatgccacataaactttaagtcgataatcattatacggttatcggcttttatttattgccaaatcttcagagagatacaaactagacaatcatttttttaaataaagaaaatattaagattgatactcatttcacaaactattactactttagagtataattatttttaatttcatataaataaaaaggcgaaaataatgcggtttaaaagtaattaattgttcaaacgatatgtaatatgtaaatactatatatataataccaattttaatgaaaatttttaagggaggtaaataatggaaagtacattagaattaacaaaaattaaagaagtattacaaaaaaacttgaagattttaattattttaccgctattatttttaattattagcgctattgttacatttttcgtcttatcacctaaatatcaagctaatactcaaattttagtgaatcaaactaagggtgacaatcctcagtttatggcgcaagaggttcaaagtaatattcaacttgtaaatacgtataaagaaattgttaaaagtcctagaattttagatgaggtgtcaaaggacttaaatgataagtattcaccatctaaattgtcgagtatgttgacaattacaaaccaagaaaatacgcaacttatcaacatccaagttaaaagtggtcataaacaagattcggaaaaaattgcgaatagcttcgctaaagttacaagtaaacaaattccgaagattatgagtgtggataacgtatcaattttatctaaagcagacggtacagcagttaaagtcgcaccaaaaactgtagtgaatctaatcggtgcattctttttaggattagttgtcgcgcttatatatatcttcttcaaagtaattttcgataagcgaattaaagatgaagaagatgtagagaaagaattaggattgcctgtattgggttcaattcaaaaatttaattaaggatggttgctacttatgtcaaaaaaggaaaatacgacaacaacactatttgtatatgaaaaaccaaaatcaacaattagtgaaaagtttcgaggtatacgttcaaacatcatgttttcaaaagcaaatggtgaagtaaagcgcttattggttacttctgaaaagcctggtgcaggtaaaagtacagttgtatcgaatgtagcgattacttatgcacaagcaggctataagacattagttattgatggcgatatgcgtaagccaacacaaaactatatttttaatgagcaaaataataatggactatcaagcttaatcattggtcgaacgactatgtcagaagcaattacgtcgacagaaattgaaaatttagatttgctaacagctggccctgtacctccaaatccatctgagttaattgggtctgaaaggttcaaagaattagttgatctgtttaataaacgttacgacattattattgtcgatacaccgccagttaatactgtgactgatgcacaactatatgcgcgtgctattaaagatagtctgttagtaattgatagtgaaaaaaatgataaaaatgaagttaaaaaagcaaaagcacttatggaaaaagcaggcagtaacattctaggtgtcattttgaacaagacaaaggtcgataaatcttctagttattatcactattatggagatgaataagtatgattgatattcataaccatatattgcctaatatcgatgacggtccgacaaatgaaacagagatgatggatcttttaaaacaagcgacaacacaaggtgttacagaaatcattgtaacatcacatcacttacatcctcgatataccacacctatagaaaaagtgaaatcatgtttaaaccatattgaaagcttagaggaagtacaagcactaaatctaaagttttattatggtcaggaaataagaattaccgatcaaatccttaatgatattgatcgaaaagttattaacggtattaatgattcacgctatttactaatagaatttccatcaaatgaagttccacactatactgatcaattatttttcgaattacagagtaaaggctttgtaccgattattgcacatccagagcggaataaagcaataagtcaaaaccttgacatactatacgatttaattaacaaaggtgctttaagtcaagtgacaacggcgtcattagcgggtatttccggtaaaaaaattagaaaattagcaattcaaatgattgaaaacaatctgacacatttcatcggttcagatgcgcataacacagaaatcagaccgttcttaatgaaagacttatttaatgataagaaattacgtgattattatgaagatatgaacggatttattagtaatgcgaagttagttgttgatgataaaaaaattcctaaacgaatgccacaacaagattataaacagaaaagatggtttgggttataaacagcaaatgaggggttttatggcacatttatctgtgaaattgcggcttttaatactagcattaatcgattcactgatagtgacattttcagtattcgtaagttattacattttagaaccgtatttcaaaacatattctgtcaaattattaatattggcagctatatcactattcatatcgcatcatatttcagcatttatttttaatatgtatcatcgagcgtgggaatatgccagtgtgagtgaattgattttaattgttaaagctgtgacgacatctatcgttattacgatggtggtcgtgacaattgttacaggcaatagaccgttttttagattgtatttaattacttggatgatgcacttgattttaataggtggctcaaggttattttggcgtatttatcggaaataccttggaggtaagtcatttaataagaagccaactttagttgttggtgctggtcaagcaggttcaatgctgattagacaaatgttgaaaagtgacgaaatgaaacttgaaccggtattagcagtcgatgatgacgaacataaacgcaatatcacaattactgagggtgtaaaagtccaaggtaaaattgcggatattccagaactagtgaggaaatataagattaaaaaaatcatcattgcaattccaactattggtcaagagcgtttgaaagaaattaataatatttgccatatggatggcgttgagttattgaaaatgccaaatatagaagacgtcatgtctggtgagttagaagtgaaccaacttaaaaaagttgaagtagaagatttactaggcagagatcctgttgaattagatatggatatgatatcaaatgaattgacgaataaaactattttagttacgggtgcaggtggttcaataggatcagaaatttgtagacaagtttgtaatttctatccagaacgtattattctacttggccatggtgaaaacagtatttatttaatcaatcgtgaattgcgaaatcgcttcggaaaaaaatgttgatatcgttcctattatagcggatgtgcaaaatagagcgcgtatgtttgaaattatggaaacgtataaaccatacgcagtttatcatgcagcagcacacaagcacgtgccgttaatggaagacaaccctgaagaagcagtacgtaataatattttaggtacgaaaaatactgctgaagctgctaaaaatgcagaggtaaagaaattcgttatgatttctacggataaagccgttaatccgcctaatgtcatgggagcttcaaagcgaattgcagaaatgattattcaaagtttaaatgatgaaacgcatcgaacaaattttgttgcagtgagatttggtaatgtacttggatcgagaggatctgtgattccacttttcaaaagtcaaattgaagaaggtgggccagttactgtgacacatcctgaaatgacacgttactttatgacaattcctgaagcttctagactagttttgcaggcaggggcattagcagaaggtggcgaagtatttgtgctagatatgggagaaccagtgaaaattgtagatttggcacgtaatttaattaagctaagtggtaaaaaagaagacgacatacgcattacttatacagggattagacccggcgaaaaaatgtttgaagagcttatgaataaagatgaggttcatcctgaacaagtatttgaaaaaatttatcgtggcaaagtacaacatatgaaatgtaatgaagttgaagcgattattcaagacatcgtcaatgactttagtaaagaaaaaattattaactatgccaatggcaaaaagggagataattatgttcgatgacaaaattttattaattactgggggcacaggatcattcggtaatgctgttatgaaacagtttttagattctaatattaaagaaattcgtattttttcacgcgatgagaaaaaacaagatgacattcgaaaaaaatataataattcaaaattaaagttctacattggtgatgtgcgtgatagtcaaagtgtagaaacagcaatgcgagatgtttattacgtattccatgcagcagctttaaaacaagtgccgtcatgtgaattctttccagttgaggcagtgaagacaaatattattggtacagaaaatgtcttacaaagtgctattcatcaaaatgttaaaaaagtcatatgtttatctacagataaggcagcgtatcctattaatgctatgggtatttcaaaagcaatgatggaaaaagtattcgtagccaaatcaagaaatattcgtagtgaacaaacgcttatttgtggtacaagatacggtaatgtgatggcttcaagaggatcagtaatacctttgtttatcgacaaaatcaaagctggagaacctttaacgattacagatcctgatatgacaagatttttaatgagcttagaagatgcggtagaactagttgttcatgcatttaagcatgcagagacaggagatattatggttcaaaaagcaccaagctcaacggtaggggatcttgcgaccgcattattagaattgtttgaagctgataatgcaattgaaatcattggtacgcgacatggagagaaaaaagcagaaacattgttgacgagagaagaatacgcacaatgtgaagatatgggtgattattttagagtgccggcagactccagagatttaaattatagtaattatgttgaaaccggtaacgaaaagattacgcaatcttatgaatataactccgataatacacatattttaacggtggaagagataaaagaaaaacttttaacactagaatatgttagaaacgaattgaatgattataaagcttcaatgagataggagagattgacgttgaatattgtaattacaggagcaaaaggttttgtaggaaaaaacttgaaagcagatttaacttcaacgacagatcatcatattttcgaagtacatcgacaaactaaagaggaagaattagagtcagcattgttgaaagcagactttgtcgtgcatttagcgggtgttaatcgacctgaacatgacaaagaattcagcttaggaaacgtgagttatttagatcatgtacttgatatattaactagaaatacgaaaaagccagcgatattattatcgtcttcaatacaagcaacacaagataatccttatggtgagagtaagttgcaaggggaacagctattaagagagtatgccgaagagtatggcaatacggtttatatttatcgctggccaaatttattcggcaagtggtgtaagccgaattataactcagtgatagcaacattttgttacaaaattgcacgtaacgaagagattcaagttaatgatcggaatgttgaactaacgctaaactacgtggatgatatcgtcgctgaaataaagcgtgctattgaaggaactccaacgattgaaaatggtgtacctacagtaccaaacgtatttaaagtgacattgggagaaattgtagatttattatacaagttcaaacagtcacgtctcgatcgaacattgccgaaattagataacttgtttgaaaaagatttgtatagtacgtatttaagctatctacctagtacagactttagttatcccttacttatgaatgtggatgataggggttcttttacagaatttataaaaacaccggatcgtggtcaagtttctgtaaatatttctaaaccaggtattactaaaggtaatcactggcatcatactaaaaacgaaaaatttctagtcgtatcaggtaaaggggtaattcgttttagacatgttaatgatgatgaaatcattgaatattatgtttctggcgacaaattagaagttgtagacataccagtaggatacacacataatattgaaaatttaggcgacacagatatggtaactattatgtgggtgaatgaaatgtttgatccaaatcagccagatacgtatttcttggaggtatagcgcatggaaaaactgaaattaatgacaatagttggtacaaggcctgaaatcattcgtttatcatcaacgattaaagcatgtgatcaatattttaatcagatattagtacacactggtcaaaattatgattatacattgaatcaaattttctttgatgatttggaattaagacaaccggaccactacttagaggcagttggaagtaaccttggagaaacgatggggaatattattgcgaagacatatgatgttttattacgcgaataaccagatgcacttttaattcttggtgatacaaatagttgtttagcagcagtatctgctaaacgattaaagattcctgtgttccacatggaagcgggtaatagatgctttgatcagaatgtacctgaagaaatcaatcgtaaaattgttgaccatgtcagtgatgtgaatctaccttatacggaacatagcagacgttatttattagatgaaggcctcaataaagcgaatatctttgtgacaggatcaccgatgacagaagtgatagaagcgcatcgagataaaattaatcacagtgacgttttaaataaactaggattagaaccgcaacaatacattttagtatctgcgcatagagaagagaatatcgataatgaaaagaattttaaatcattaatgaatgcgataaatgatattgccaaaaagtataaaatgcctgtgatttattcaacgcatccaagaagttggaagaaaattgaagaaagtaaatttgaatttgatccattagttaaacagttaaagccatttggtttctttgattataatgcattgcaaaaagatgcatttgttgtgctatcagatagtggaacattgtcagaagagtcgtctattttgaagttccctggtgtccttattcgaacttccacagaaagaccggaagtactagataaaggtacggttattgtaggtggtattacctataacaatctaatccaatccgttgaactagcaagagagatgcaaaacaataacgaaccgatgattgatgctattgattataaagacactaacgtttcgacaaaggtagttaaaattattcaaagctataaagatattatcaatcgaaatacttggaggaaatgacgatgaggatagcgattgaaaagataattggtttgctgaaaaaccagtcctctaaagaatcgaatgttaagattcatcgcttggcgtatattacaaactcaaaatttgatggcaataactatatagatagatggtgtaaaatcaggaattctcacattggtgaatacagttatattggatttggtagtgattttaataatgtagaagtaggaagatattgttcgatatcttcggatgtaaaaattgggttaggaaaacatcctacacacttttttagctcatcaccgattttttattctaataataatccatttaacataaagcaaaagtttatagactttaatgaccaaccaagccgtacaacaattaaaaatgatgtgtggattggtgcaaatgtaattattatggatggtttaacaataaatactggtgcagtcatagcagccggctcagttgttactaaaaatgtaggagcatatgaggttgttggtggtgttcctgcaaaagtgattaagaagcgatttgacaataaaacaattgaaaaacttttggaaagcaagtggtgggagaaaacgcctgacaaactaaaaggattttcggttgaatatttaaataaaaaggatacttaatgatatgagaattttaaatattgtatcgagtaatattgttcaagacccaagggtacttaaacaaatagaaacaattaaaggcgttacggatgattataaaattgttggaatgaataattcacaagctactaataagcgattggaaaatttagattgtaattatcgtttgttaggtagcaaggtagatccaaaaaatattctttctaaattaattaagcgtataagatttgcaacaggtgttatccgagaaattaaagcttataaacctgacgtgattcatgcaaatgatttcgacgtattattaatggtctatttaagcaattataaaaaagctaatattgtttatgatgcgcatgaaatatatgcgaaaaatgcctttattaataaagttccacttatttcaaagtttgtagaaagtatagaaaaacacatagtaaaacatcgtgttaatgccttcgtaacagtaagtcatgcagcaaaagaatattatcaatctaaaggatataagaaggaagcgaatgttattacgaatgcacctattttaaatgatagcagagaatttaaagaaatcgaaaactttaaagaaattgtatatcaaggtcaaattgtaatggacagaggatatgaagagtttattattgcttcatcagcttttaaacaaaatgctccttcattcataattcgagggtttggtccgcatgaagaagtgataaaagaactgattagttataacccggaaaatattaggttggataaaccagttgaagtaaaagaattggttgataagttagcagaaagtaatgttggtgttgtcttgacgaaaccagtatctattaattttgaatatacagtatctaataaaatttttgaatgtatacatgctggtttaccagtaattttatctcctgtcaaagagcatatttatctcaatgaaaaatataaatttggcattgttctaaaggaagttacgccgttagaaattgaaaaggcggttagaaaattaagagataatcacgatttgtttaatcatttacgtcaaaatgcaattaaggcgtctaaaattttgaattggcaaatagagagtgaacggttagtagaattatataaattttaaagagaggtagactatgaaattttttgtactttgtgcaattatcagcatgaacatatttatagtaatctctacatttactaaagaagtattagggttccctatagagccggtgtattactcaaccatggttggtatagcattaattactacggtgtttgctatttataagataattgtcacccaagaaattccgcgagggttaatattattaattgctatatgtttgctttatctagctttttattatttttcaccagataaggaagagaaactagctaaaaataatattctattctttttaacatgggcagttccagcggcaattagtggtatttatattaaatatataaacaaggctacggtagaaagattttttaaattagtatttttcatattttctgtttcatttatttttgtaattttaataccaaaacttacaggtgagatacctagctatatcaattttggacttatgaactatcaaaacgcttcgtacctttcagcatttactgccggattaggcatttatttcattatgaaaggttcagttaaacataagtggatatatgttctatttacaataattgatatccctattgtgtttataccaggagggcgtggaggtgctattttattaattctttacggcttatttgcatttatacttattacgtttaaaagaggaatacctatcgcagtaaaaagcattatgtatatttttgcattaagcatatctagtgtattgatttactttctttttacaaaaggttcgaatactagaacattttcatatctacaaggtggaacacttaatttagaaggtacttctggaagaggaccgatttatgaaaaaggtatttactttattcaacaaagttcgttattaggctatgggccatttaactattataaactaatcggaaatataccacataacatcattattgagttgattctatcatttggcttattagggttttttatcataatgatttgcattttgctactagtttataaaatgattaggaactatgatccaaacactatagatttactcgttatgtttatagcaatctatccaatcacattattaatgtttagttcaaattatttagttgtaagtgaattttggtttgtgttgttctattttattacaaaaggacggcgtcatcatggctaagaaagtttttattatggatagcgtaaagacaataattggtacgttgcttatagctttaggattacaatttttagcttatccaattattaatcaacgagtaggtaatgaagcgttcggttctattttaacgatttatacaataataacaatcacgagtgttgtattaggcaatacgcttaacaatatacgattgattaatatgaatctatacaaatccaatcattactactggaaatttgcatcgatacttttaatctcaattctgattgagagtatagctttaattattgtatttctttacttttttaatttgaacatcatcgatattatctttttaattctacttaatattttaatgtgtttaaggatttatctgaatgtattttttaggatgactttaaaatataatcagattttgtatattgctcttattcaatttttaggtttgctgataggactatttctatattatttaacccaaaactggattgtttgttttattaccagtgaattgtttgcaacgatatatacattggttaaattacggggattaactataggcgagtatcaaagtgaagataataatgtggtaaaagattatgtgatgctactgagtacaaatagccttaataatttgaatctctatttagatagattaatcttattaccaattataggtggaacagctgtaactatatcatttctttcaacatttattgggaaaatgttagctacatttctatatccgattaataatgtagtactttcatatatttctgtaaatgaaagtgacaatataaagaagcaatatttgaaaactaatctaattgctatagctgccctatgtttagtcatgattatatgttatccaattacaataattattgtctctttactgtataacattgattcaagtttatattcgaagtttattattttaggtaatataggtgttttattcaatgcagtgagtattatgatccaaactttaaatacaaaacacgcatcaataacattacaagcgaattatatgacgcttcacacgattacatttatattcataactattttaatgacaattgcgtttggtctaaatggattcttttggacaacgctgttcagcaacattattaagtatgtgattttaaatattataggtttaaagtctaaattcattaataaaaaggacgtcgattagatgagtgaaaaaaagattttgattttatgtcagtatttttatccggaatatgtatcttctgcgacgttaccaactcaattggcggaagatttaattgcgaatcacattaatgtcgatgtcatgtgtggatggccatatgaatatagtaatcataaacaggtttctaaaaccgagatgcatcgtggtattcgcattcgacgtctcaagtattcgaggtttaataacaaaagtaaggttggaaggatcatcaatttctttagtttattttcaaaattcgtgattaatatacctaaaatgttgaaatatgatcagattcttgtttactctaatccaccaatcttgccattaataccagacgttttacacagactgcttaagaaaaaatattcttttgtggtgtatgatatagcacctgataatgcgattaagacaggtgcaactcgtccaggtagcatgattgataagctgatgcgttacattaatagacatgtctacaagaatgctgaaaatgtcattgtccttggtacggaaatgaaaaactacttactaaatcatcaaatttctaaaaatgctgacaatatccatgtgattcctaactggtatgacatgcgtcaattacaagacaatcgtatctataatgacacatttaaagcttaccgtgagcaatacgacaaaattttattgtatagcggtaatatggggcagttacaggatatggagacacttatctcatttttaaaattaaataaggatcagtctcaaacgttaacaatactttgtggtcatggtaagaaatttgcagatgtcaaaacggcaatagaagaccatcgtattgaaaatgttaaaatgtttgagtttttaacaggtacagactatgctgacgtattaaaaattgcggatgtatgtattgcatcgctgattaaagaaggcgtcggtttaggcgtgccgagcaagaattatggctatcttgcagctaagaaagcgttggtactcatcatggataagcaatctgatatcgttcaacatgttgaacaatatgatgcgggtatccaaattgataatggcgatgcacatgccatttataacttcatcaacactcactcgagtaaggaattgcacgagatgggtgagcgcgcacatcaactgtttaaagataaatatacgagagaaattaatactatgaagtattacaatctgttgaagtgaggagataattatgaagcgattattcgatgtagtgagttcaatatatggtttagtagttttaagtccgattctgttaattacagcattactaattaaaatggaatcacctggaccagccattttcaaacaaaaaagaccgacgattaataatgaattgtttaatatttataagtttagatcaatgaaaatagacacacctaatgttgcaactgatttaatggattcaacatcgtatataacaaagacagggaaggtcattcgtaagacctctattgatgaattgccacaattattgaatgttttaaaaggagaaatgtcaattgtaggtcctagaccagcgctttataatcaatacgaattaatcgaaaaacgtacaaaagcgaacgtgcatacgattagaccaggtgtgacaggactagctcaagtgatggggagagatgatatcactgatgatcaaaaagtagcgtatgatcattattacttaacacatcaatctatgatgcttgatatgtatatcatatataaaacaattaaaaatatcgttacttcagaaggtgtgcatcactaatgagaaaaaatattttaattacaggcgtacatggatatatcggtaatgctttaaaagataagcttattgaacaaggacatcaagtagatcaaattaatgttaggaatcaattatggaagtcgacctcgttcaaagattatgatgttttaattcatacagcagctttggttcacaacaattcacctcaagcaaggctatctgattatatgcaagtgaatatgttgctgacgaaacaattggcacaaaaggctaaagctgaagacgttaaacaatttatttttatgagtactatggcagtttatggaaaagaaggtcatgttggtaaatcagatcaagttgatacacaaacaccaatgaaccctacgaccaactatggtatttccaaaaagttcgctgaacaagcattacaagaattgattagtgattcgtttaaagtagcaattgtgagaccaccaatgatttatggtgcacattgcccaggaaatttccaacggttaatgcaattgtcaaagcgattgccaatcattcccaatattaacaatcagcgcagtgcattatatattaaacatctgacagcatttattgatcaattaatatcattagaagtgacaggtgtgtaccatcctcaagatagtttttactttgatacatcgtcagtaatgtatgaaatacgtcgccaatcacatcgtaaaacggtattgatcaacatgccttcaatgctaaataagtattttaataagttgtcggtctttagaaaattattcggcaatttaatatacagcaatacgttatatgaaaataataatgcacttgaaattattcctggaaaaatgtcacttgttattgcggacatcatggatgaaacgacaaccaaagataaggcataagtcatctattaaataaaatcaacatacaaatcgttttatttggaggttatagtatgaagttaacagtagttggcttaggttatattggtttaccaacatcaattatgtttgcaaaacatggcgtcgatgtgcttggtgttgatattaatcagcaaacgattgataagttacaaagtggtcaaattagtattgaagaacctggattacaagaggtttatgaagaggtactgtcatcgggaaaattgaaggtatctacaacgccagatgcatctgatgtttttatcattgccgttccgacgccgaataatgatgatcagtaccggtcatgtgacatttcgctagttatgcgtgcattagatagtattttatcatttttagaaaaaggaaataccattattgtagagtcgacaattgcgcctaaaacgatggatgattttgtaaaaccagtcattgaaaatttagggtttacaataggtgaagatatttatttagtgcattgtccagaacgtgtactgccaggaaaaattttagaagaattagttcataacaatcgtatcattggcggtgtgactgaagcttgtattgaagcgggtaaacgtgtctatcgcacattcgttcagggagaaatgattgaaacagatgcacgtactgctgaaatgagtaagctaatggaaaacacatatagagacgtgaacattgctttagctaatgaattaacaaaaatttgcaataacttaaatattaatgtattagatgtgattgaaatggcaaacaaacatccgcgtgttaacatccatcagcctggtccaggtgtaggcggtcattgtttagctgttgatccgtactttattattgctaaagaccctgaaaatgcaaagttaattcaaactggacgtgaaattaataattcaatgccggcctatgttgttgatacaacgaagcaaatcatcaaagtgttgagcgggaataaagtcacagtatttggtttaacttataaaggtgatgttgatgatataagagaatcaccagcatttgatatttatgagctattaaatcaagaaccagacatagaagtatgtgcttatgatccacatgttgaattagattttgtggaacatgatatgtcacatgctgtcaaagacgcatcgctagtattgattttaagtgaccactcagaatttaaaaatttatcggacagtcattttgataaaatgaagcataaagtgatttttgatacaaaaaatgttgtgaaatcatcatttgaagatgtatcgtattataattatggcaatatatttaattttatcgacaaataaaatgtgtcaaactagggcatacatgattaaggaaagataagctgtcatgtgtttgaacttcagagaggataatgttatgaaaaaaattatggttattttcggtacgagacccgaagcaataaaaatggcaccattagtaaaagaaattgatcataatgggaactttgaagcgaacattgtgattacagcacaacatagagatatgttagatagtgtgttaagtatatttgatattcaagctgatcatgatttaaatattatgcaagatcaacaaacattagcaggccttacggcgaatgcacttgctaaacttgatagcatcattaatgaggaacaaccggatatgattttagtacatggtgatactacaacgacttttgtaggaagtttggcagcattttatcatcaaattccggtcggacatgtagaagctggacttcgaacacatcagaaatactcaccatttcctgaagagttaaatcgagtcatggtaagtaatattgctgaattgaattttgcgccaacagtaattgcagctaaaaatttactttttgaaaacaaagacaaagagcgtatctttattactggaaatacagttattgacgcattgtcaacaacagttcaaaatgattttgtttcaacgattattaataaacataaaggcaagaaagttgttttactaacagcgcatcgtcgtgaaaatattggggaaccgatgcatcagatttttaaagcagtaagagatttggcagatgaatataaagatgttgtcttcatttatccaatgcatcgtaatccaaaggtaagagcgattgccgaaaaatatttatctgggagaaatcggattgaattaattgagccattagatgcgattgagttccataattttacaaatcaatcgtacctcgtgctgacagattctggtggtattcaagaggaggctcctacatttggaaaacctgtgttggtattaaggaatcatacagagcgtcccgaaggcgttgaggcgggaacatcgagagtaattggcacagattatgacaatattgttcgaaatgtgaaacaattgattgaggatgatgaagcgtatcaacgtatgagtcaagcgaataatccatatggtgatggacaagcatcacgacgtatttgtgaagcaatagaatattattttggattgcgcacagacaagccggatgaattcgtacctttacgtcacaaataataaaaaacccctaatcatgaagttggtttagacaaccagcggtgactaggggtttttaatatatttatttttgatagtggtagccaatatcatatttgaatactttatttgataatattggactttgctgtccatcgtcatcactttttaaacgtacatttttatgagcttctttaaatacatcggaattcaaccaattattaaagctatcttcagattcccaaatagttaagattttaacttcgtctgtatcctcggtatttaatgttttagtgacaaacatttgttggaagccttcaatagtttcaataccttgtctattgtaaaaacgttcaatcgtttcttccgcactgcctttttgtaattgtaatctattttctgccataaacatgggcaatcactcctctattttatgatttgatttgggtaatgtttttacaaatgtaaagagtacagcggtttgtatgataaccattatgattaatcctacacggactgcaagaacatccaccatataaattgaaaaacctattacaatgtataagctaattaaaattttaattttctgttgtagcgtgtagcctcgatgtaaataaaagttttctacatattctttataaattttttgattaataagccaattgtaaaagcgatctgaacttcgagcaaaacaaaaaactgctacgagtaaaaaaggggtcgttggcagtaaaggtaatacggcacctgcaataccaagcgctgtaaatattaagccaatgacgattaaaataagtcgcattgaaaaaactccattctagtactaatgcgcatgtaatattgttttagtaatataactcatgctaaatataatgtgtatgataagtgcaatgactcagtaaaatgaaacgatgttgaattatccttgtcacattaacgcattttaagcgcgactttcataacaaccaaactatttaatgagaattattctcaagtattatagttatattatgtgttttatttttgaaaagtgcaatatgttttcgaaaataagattatttttatgtgcaaaaacgacgcaaaagttttaaaaatgagacttctgtgagctgattattttataaaatgtaaacgcttactatataatgtgaatcatatcgtttaaaagcattattaaatatgatgctaagagatttatattatagccaataaacaaaggagagataatatggcagtaaacgttcgagattatattgcagagaattatggtttatttatcaatggggaatttgttaaaggtagcagtgacgaaacaatcgaagtgactaatccagcaactggagaaacactatcacatattacaagagcaaaagataaagatgtcgatcatgcagtcaaagtggcgcaagaggcatttgaatcatggtcattaacttctaaatcagaacgtgcacaaatgttgcgtgatattggtgataaattaatggcacaaaaagataaaattgcaatgattgaaacattaaataatggtaaaccgattcgtgagacaacagcaattgatattccatttgctgcaagacatttccattatttcgcaagtgttattgaaacagaagaaggtacagtgaatgatatcgataaagacacaatgagtatcgtacgacatgagccgattggcgtcgtaggtgctgttgttgcttggaacttcccaatgctattagctgcatggaagattgcgccagccattgctgcaggtaatacaattgtgattcaaccttcgtcttcaacaccattaagtttattggaagttgctaaaattttccaagaggtattacctaaaggtgttgtcaatatactaacgggtaaaggttcagaatcaggtaatgcaattttcaatcatgatggtgtagataaattatcatttacgggctcaactgatgtaggttatcaagttgccgaagctgcagcaaaacatctagtacccgctacattagagcttggtggtaaaagcgccaatatcatattagatgatgctaatttagaccttgcagttgaaggtattcagttaggtattttattcaaccaaggtgaagtatgtagtgcaggttctcgattattagttcatgaaaaaatttatgatcaattggtgccacgtttacaagaggcattttcaaatattaaagttggaaatccacaagatgaagctacacaaatgggtagtcaaactggtaaggatcaattagataaaattcaatcatatattgatgcagcaaaagaatcagatgcacaaattttagcaggcggtcatcgcttaactgaaaatggattagataaagggttcttctttgagccgacattaattgctgtgccagacaatcatcacaaattagcacaagaagaaatatttggaccagtgttaacagtgattaaagtgaaggacgatcaagaagcaattgatatagctaatgattctgagtatggtttagcaggcggtgtattttctcaaaatatcacacgtgcattaaatattgctaaagctgtacgtacaggacgtatttggattaacacttacaaccaagtaccagaaggcgcaccatttggtggttataaaaaatcaggtatcggtcgagaaacttataaaggtgcgttaagtaactatcaacaagttaaaaatatttatattgatacaagcaatgctttaaaaggtttgtactagaataaatatcgtttctgaagcgtgtttgtaggtcagtctagcggtaagtcttaacatttaacggcgttgtttagattttaagcaaaacaaaatatataggaacacgtatcatgatattaggatataatgactaaaataatagcagtaggatggtttttaattgcaaatcatcttactgctgtttttaattatgctaatttgcgatgcggctattataaggacagagttgtttattaattatggtgatttagaaatatgaagttcaatatgcaaagtcatcgtttgttttaatatgcggaacaatcattaaagttattgcgattttttgaacttaatgaaactaaacaataaatttgagatacttttttgtcatttttatgtaactaacacaataatctcgtacattattaaaattttctatatgataggaataaagcaaagcgcgagtgtgctgtaaaagttttccaaggtgatattacataaagctataaagggtaaagattaatgagttgtcatgtaaatgacgatgatgtataaatcatggttaattacggaagcattaatattaacctgagaagctataaagaattatttttaaaagcgacaatattaaatacgacgcatttatttaggagtggcaaacgtatgaatgggaaaaaggcgaatacgataaacagatacaaatattttcatcatgtcaatcatcaaaaaattcaacaaagttctaaaaagacgctgtgggcatcactaatcatcacattgttatttacagtgattgaatttgtcggaggtttagtatctaattcattggcattactgtcagattcatttcatatgcttagtgatgtattagcacttggtttatctatgttggccatttattttgcaagtaaaaagccgactgcacgatacacatttggatatttaagatttgagatattagctgcatttttaaatggtttagcattaattgtaatttcaatctggattttatatgaagctattgtacgtattatttatccgcaaccaattgaaagtggcattatgtttatgattgctagtattggtttactcgtcaatattattttgactgttatccttgtaaggtctttaaaacaagaagacaatatcaatattcaaagtgcattatggcatttcatgggagacttattgaactctattggtgtcatcgttgcagttgtattgatttactttacaggatggcgcatcatcgacccaatcattagtattgtaatttcactcatcattttacgtggtggttataaaattacgcgtaatgcgtggttaattttaatggaaagtgtgcctcaacatttggatactgatcaaattatggcagatattaaaaacatagatggcatattagatgtacatgaatttcatttgtggagtattacaacagagcattattcattaagtgcccatgttgtgttagataaaaaatatgagggtgatgattatcaagcgattgatcaagtatcatcattgttgaaagaaaaatatggcattgcacattcaacgttgcaaattgaaaacttgcaattgaatccattagatgagccatacttcgacaaattaacataaataaaacattgtagcgcctaaaacattaatctatgtcataggcgcacgtttcgttttatacttatgttgcatcatttaaatgattttcgtcaatttctttgatgctatctacatctaacacgacatctttaggtttcaaaatatgaatatgtttttcatcatttgtatgtaaaatgcgttctatgatgtacctttgaccggccattgtttctacagcaatctttttgtttctagctaaacttgctacgacagattctttatccataatgatagccccctatatatatgtttatttacttataccctaacatgatttttatactctttgaaaatatattttacagaattttatctaaatatttaaaaaaatatcttaatatccttgtaatccgataagaattatagtaatattttttcaaccattgttataggaggtcttattaatgacattatttttattagaagctaacaatcttgattttgcatcaacgaaagaagaactagaagcaaaggcagcatcactatctacgaagacaattccaacattaattgaagtacaagctactgaaaatttaactcatggttattttattgtggaagcaaatgacgaagcagaagctaaacaatttttaacagaagcagatattagtattcaattagtcaaagaagtacgcttagttggtaaagatttagatgaagttaaaaatggtgatgcacatgttgattaccttgtaacttggaacattccggaaggcattacgatggatcaatatttagcacgtaaaaagaaaaattctgttcattatgaagaagtgccagaagttgaatttaaacgcacatatgtatgtgaagatatgtctaaatgtatttgtttatacaacgcacctgatgaagaagcggtacgtcgcgcgcgcaaagcagttgatacaccgattgatggcatcgaaaaactttaataagacaacaagttgatgagatatatgtatataggtttggcatggatttcgattgcagttaattagaatagctcaatgctataaatgtaagtagttgatatgaagaaactaatgaactaaatgcaagtattgtctaaaacaatcattttattgaaatttagtagagctgaaattaatataacgtcgttaattgaataacgcttatgttataagagcactcataccaaaccataatcatctatagatataacaattcacgatataagggctgtgtttggcatagccctttagatatacacttaattcctattaaaatagtaggggttaaaagggggcttgtcatgattaaaattcaacaattacaacatcactttggatcacataaagtaattcataactttaatttggacattagcaagggagaaatagtcactttcatagggaaaagtggttgcggaaagtctactttactcaatattatcggtggatttattcatccatcgtctggtcgtgtcattattgataacgaaattaaacaacagccatctccagattgtttaatgctatttcaacatcataatttgctgccatggaaaacgattaatgacaacattaggattggattacaacagaaaattagtgatgaagagattaacgcacagcttaaattagttgatttagaagacaggggaaagcattttcccgagcaactgtccgggggtatgaaacaacgtgtggcactatgtcgagcgcatgtgcataagcctaacgttatatcgatggatgagccattaggtgcattagatgcatttacacgttataaacttcaggatcaactagtgcaactaaaacataaaacgcaatcaactattattttagtgacgcatgacattgatgaagctatttatctttccgaccgcattgttctgttaggtgaagggtgcaatattatttctcaatatgaaattacagcatcacatccacgcagtcgtaatgatagccacctacttaagattcgtaatgaaattatggaaacatttgcattgaatcatcatcaagttgaacctgaatattatttataaggagtgagtgacgatgaaaaggttaagcataatcgtcatcattggaatctttataattacaggatgtgattggcaaaggacgtctaaagaacggtctaaaaatgcccaaaatcagcaagtgattaaaattggatatttgccgattacacattcagctaatttgatgatgactaaaaaattattatcacaatacaatcatccgaaatataaactagaattagttaaattcaataattggccagatttaatggacgcattaaacagtggtcgtattgatggtgcatcaactttaatagagctagcgatgaaatcaaaacagaagggctcaaatataaaggctgtggcattgggccatcatgaaggcaatgtcattatgggacaaaaaggtatgcacttaaatgaatttaataataatggcgatgattaccattttggtataccacatcgttattcaacacattatcttttacttgaggaattacgtaaacaattaaagattaaaccggggcattttagctatcatgaaatgtcgccagcagaaatgccagccgcattgagtgaacacagaattacagggtattctgtagccgaaccattcggtgcactgggtgaaaagttaggcaaaggtaagactttgaaacatggtgatgacgttatacctgatgcgtattgctgtgtgctagtactgagaggggaattgcttgatcaacacaaggatgtagcgcaagcatttgtacaagattataaaaagtctggctttaaaatgaatgatcgcaagcaaagtgtagacattatgacgcatcattttaaacaaagtcgtgacgttttaacacagtcagcggcatggacatcctatggtgatttaacaattaagccatccggctatcaagaaattacgacattggtaaaacaacatcatttgtttaatccacctgcatatgatgactttgttgaaccgtcattgtataaggaggcatcgcgttcatgacacgtcccacaaataacaaatttatattacctattatcacatttattattttcttaggcatttgggaaatggtcattattattgggcattaccaacctgtattgttaccgggtcctgctcttgtaggaaaaagtatatggtctttcattgttactggagaaattttccaacatttagcaattagtttatggagatttgtagcgggctttgttgtcgcattgttggttgctattccattgggcttcttgcttggaaggaatcgttggctatacaacgctatcgaaccgctatttcaattgattaggccgatatctccgatagcatgggcaccatttgttgttctatggtttggtattggtagtttgccagcgattgcgattatttttatcgctgcttttttcccaattgtgttcaatactattaaaggcgttagagacattgaacctcaatatttaaaaatagcagcaaatttaaatttaactgggtggtcattgtatcgcaatatattatttcccggggcatttaaacaaatcatggctgggatacatatggcggtaggaacaagttggatatttttagtttctggtgaaatgattggtgcacaatcgggattaggttttttaatcgttgatgcacgaaatatgttgaacttagaagatgttttagcagcaatattctttatcggattatttggttttattattgatcgattcattagttatattgagcagtttatacttagaagatttggtgaataaggagagatgatgatgactttagaaacgcttatcaaagaacaattagatcctcatttagtagaagttgatgaagggacgtattatccgagaacatttattcagcaattatttgtagatggttatttcggtgaggcggcattgagaaaaaatgctgaagtaatcgaagctgtatcgcagtcttgtttgacaacaggattttgtttatggtgccaattagctttttcaacgtatttagaaaatgccacgcagccacatttaaataatgacttacaacagcaattgttatctggagaaatattaggtgctaccggattgtctaatccgatgaagtcatttaatgatttagaaaaagttgaaccttgaacacacttatgttgatggacaattggttgtcagtggacgtatgccagctgtaagtaatattcaagaagaccattattttggtgcgatttcgaaacatgaatcatcagatgaatttgtcatgttcattctacgtgccaatcaagatggtatcactcttgttgaaaaaaccaattttttaggagtcaacgggtcagcaacgtatcaaatcacattgaatcaagtcgtagtgccacaatcacaaattatcacgcatgatgcgaagcagtttgcggcaactattcgcccgcaatttattgcttaccaaattccaataggattaggctcaattaaaagttctttagagttaattgatgcattttcaaatgtgcaaaacggaataaatcaatatttagagtatgatgttgaagcttttaaaaaacgttatcgtcaacttagagaggaatattatgcaatattagatgacggtaacttaacttcacatttaaatgaattaatatcattgaagaaggacatcggctatttattgttagatgtaaatcaagcttctgttgtcaatggtggttctagagcgtacacaccatattcgccacaagttcgcaagttaaaagaaggattcttcttcgcagcattgacaccgacattaagacatttaggtaaacttgaagcagagttgaaggggtaagtgtgataagctgattttttgtttagatgcgtttgttgaaacattttttaaaataatataaatcttagtttataaacattttctgttaatttgttatatccttttaactaggaaaatatacatttcgtaataataataatcgttatcattgaaaaagtgttaataaggtgtataatgaaaatgtgaacaattaatgaacttcttattttaaagaaggtgaatactatagatacgcatactaaagaacaacaattctcgaatctagtaagatcttatcgtaaagaatacgtgggtaaaggacccaatagtattcgagtgtcgtttaaagataattgggcgattgcacatatgacaggtgttttgagtaaagttgagagtttttacctaaacgacaaacgcaatgaatcgatgctccattatacacgcacagagaagattaaacagatgtataaagaaatagatgtaaatgagatggaaagtcttgtaggcgctaagtttgtaaaattatttacagatattgatttgaatgatgatgaagtcatttcaatatttgttttcgataagtcaatagaataagtgttgctggtgtaaggtacacggtgctgtttgctaacttcgctttgaatttaacaataattcaagggggtggtatgtcaaacggtgccgtttttttgtcatatttttaaaacaagcaacatgcaacacgtactttaaggaagtcaaaatttatcatttaggagagatggatatgaaaatcgtagcattatttccagaagcagtagaaggtcaagaaaatcaattacttaatactaaaaaagcattaggattaaaaacatttttagaggaaagaggacatgagttcattatattagcagataatggtgaagacttagataaacatttaccagatatggatgtgattattagtgcgccattttatcctgcatatatgactcgtgaacgtattgaaaaagcaccgaacttgaaattagcaattacagcaggtgtaggatctgaccatgtagatttagcggcagcaagtgaacacaatattggtgtcgttgaagttacaggaagtaatacagttagtgtggcagaacatgcggttatggatttattaatacttcttagaaactatgaagaaggtcatcgtcaatcagtagaaggtgaatggaacttgtctcaagtaggtaatcatgcgcatgaattacaacacaaaacaattggtatttttggatttggtcgaattggacaacttgttgctgaaagattagcgccatttaatgtaacattacaacactatgatccaatcaatcaacaagaccataaattgtctaaatttgtaagctttgatgaacttgtttcaacaagtgatgcgattacaattcatgcaccattaacaccagaaactgataacttatttgataaagatgttttaagtcgtatgaaaaaacacagttatttagtgaatactgcacgtggtaaaattgtaaatcgcgatgcgttagttgaagcgttagcatccgagcatttacaaggatatgctggtgatgtttggtatccacaacctgcacctgctgatcatccatggagaacaatgcctagaaatgctatgacggttcactattcaggtatgactttagaagcacaaaaacgtattgaagatggagttaaagatattttagagcgtttcttcaatcatgaacctttccaagataaagatattattgttgcaagtggtcgtattgctagtaaaagttatacagctaaatagaataaggatgctgggctagcgattaacgctttcaattttatataaatgaatcatataagcactactgctgttgtaaagatggcagtagtttttttatgattacatctaagtatagtcacagctatgttaggacaatgatttaacatttacgcacatatgtgttcacttacgcaattattgataaatttcattcatttggaataatatatagtcatatagtgctaatttttttgaggcattatatgcaagatgcattgtaaagtcgatgcatttgtttgttaaataactttgtataactaaaaattctttgtttcaacgtataatctaataatagattttatataaatggtagtgtgtatatatgtggaaaggggtgtagttattaatgaaacgcttaagtacgactttgaaagtacgattgattagcaattttttacagctaattattacgacagcatttataccgtttatagcactatatttaacagatatgttaagtcaatcaattgtcggtatatatcttgttggtttagtggttctaaaatttccattgtccattatatctggttaccttattgagatatttccgaaaaagttgctagtacttatttatcaagcgacgatggtgataatgcttgtgttcatgggcgtatttgggtcacatcaattgtggcaaattattggtttttgtgttgcatatgccatatttacaatcgtttggggattacaatttccagttatggacacattaattatggatgcaattaccgaagacgtggaacattatatttacaagattagctattggatgacaaacttatcggtagctattggggcattgttaggtggcttgatgtatggctacagtatgttactacttttcttaatagcagcttgtatatttttaattgtactctttattttatatatttggttacctcaagaccgaaatcaagtaaagcaaagtgatgacaagaggcatgcaagtcgttatcaaaaattacaaataatgaatatatttcgcagttataaattagttttgaaagaccgtaattatatgttattgatttcggggttcagtatcatcatgatgggtgaattttcaatctcctcatatattgctattagactaaaggatcagtttgaaacaataagtataggttcatatgatattacaggtgctaagatgttagcaatcttgctaatgattaatacggtcgtcgtcattttactcacgtattcaatctcgaaagttgtattgaaaatagattttaaaaaagctttaatcactggtttgctgatttatattgttggctatagtggtctaacctatcttaatcagtttggcttattagttgtttttatgataattgcgactgtaggtgaaattatttattcgcctatagtttcagaacaacgctttaaaattattcctaaagctaaaagaggaacatatagtgcagttaatgcattaggtattcatttttcagaaacactagctaggttagggattgtgttgggtgttttcttaacgtcattacaaatgggactgtatatgtttatcgttttaacaattggtgctagcatgcttgttgctggtgtatttgggggacaaaaacaagtgaatacaaattgaatttatttaaatatttattttatgcatctttttatatggaaaacctattaatttggtcgtaattaaaatagagataaatttattaagaatttgttaaaatttaaggataacaattgttttatgcgagttgtttgtttaatataaacttgcttcatggatattttgtaacaacaatattgagtttgcaatgagatgtgaacaacagaaagtgattaacgagttgtagtgtgctatttatcgaagatgtatgtaatttacattgaaaaatataccaattgtaacgatgatacaagatgtattttagggtagaatatatcgctcatatgttgcgaatggtgttttatattaatcattacataacgagttaattaacatttcgtcggttatcatatcatcatgcaatttcagtaagtaatgagtattatgatatgaaagaaggactttttatgattatgggtaatttgagatttcaacaggaatattttcgtatatacaaaaataatacagaatcaacgacacaccgtaatgcgtattgggttaaactcgctaaaaatgttgaagctactaaaatgatgtatgcattatcgacaattgtgcaacaacatgcatctataagacatttttttgatgttactaccgatgacaatttaacaatgatacttcatgaatttctgccttttattgagataaaacaagttccatcttcttccgcaaactatgatttagaagctttttttaagcaagaattaagtacttaccattttaatgattcacctttattcaaagttaaattgtttcagttcgctgatgctgcatatatactattagattttcatgtgtccattttcgatgatagtcaaattgatatttttcttgatgatttatgcaatgcatatcgtggcaatactgttattaacaatactcgacagcatgcacatataaatagaaatgatgataaagacaatcaagatgcatcgcatatagcattagactcaaactattttcggttagagaataactctgacatccatattgatagttattttccaattaagcatccatttgaacaagctttatatcaaacgtatttgattgatgatatgacatcaatagatatggcatcgttggctgttagtgtgtatttagctaatcatataatgagtcaacaacatgatgtcacattaggtatacatgtaccatcacatttaccaaatgatttacacggaaatattgtgccgttaacgttaacaatcgatgcaaaagatgtatgtcaacgttttacaacagattttaataaatgtgtgttgcaaaatatgtcgcaattacagtgcgcgaagtcttcgctttcactagagactatttttcattgttatcatcatatgatgtcttgttgtaatgatgttattgaggatgtacatcaaatacatgatgcacatacatctttagcggatattgaaatttttccacatcaacacgggttcaaaattatatataacagtgcagcatatgatttgctctcaatcgagacgctgagtgacttagttcgaaatatttatttgcaaattactgaagaaaatggaaataaacgaacaactgtagatgaacttaatttgatgacagaacgtgatattcaattatatgacgatatcaatttaagtttgcctgagatagatgatgcgcaaacagttgttaccttatttgagcaacaagttgaagcaacgccgaatcatgtcgctgtgcaatttgacggagtgtttataacatatcaaacattgaatgcacgcgcgaatgatttagcacaccgtttgagaaaccagtatggtgttgaacctaatgatcgtgtcgctgtcatagctgaaaaaagtattgagatgataatagcgatgataggtgtgttgaaagctggtggggcttacgtgccaattgatccgaactatccaagtgatcgtcaggagtacattttaaaagatgtaacgcctaaagttgtaataacgtaccaagctttatatgaaaatggtaaacaaaatattaatcacattgatttgaataagatagcgtggaaaaatattgataatctttctaaatgtaacacgttagaagatcatgcttatgttatttacacgtcggggacaactggtaaccctaaagggacactaattccgcaccgaggtattgttcgattggtccatcaaaatcattatgtaccattaaatgaagagacgacgattttgttatcaggaactatagcctttgatgctgcaacatttgaaatatatggtgcattgctcaatggtggaaagctgattgttgctaaaaaagaacaattattaaatccaatagcggtagaacaattaatcaatgaaaatgacgttaatactatgtggttaacctcctcattatttaatcagattgctagtgaacgaatagaagtattggtaccgttaaagtatttattaattggtggagaagtattgaatgctaagtgggtggatttgcttaatcaaaaaccgaagcatcctcaaattattaatggttatggaccaactgaaaatacaacatttacaacgacgtataatatacctaacaaagttccaaatcgtattcctattggtaaaccgattctgggtactcatgtttatatcatgcaaggcgagcgtcggtgtggcgttggtattcctggagaattatgtacaagtggctttgggttagctgcaggttatttaaatcagccagaattgacagcagataaatttatcaaagattcaaatataaatcagctgatgtatagaagtggtgatatcgttcgtttgttacccgatggcaacatagattatttatatcgaaaggacaaacaagttaagattcgagggtttaggattgagttgtcagaggttgagcatgcgctcgagcgtatacaaggtattaataaagcagttgttattgttcaaaatcatgatcaagatcagtatatcgttgcttattatgaagcgatgcatacattatcacataataagattaaatcacaattacgtatgaccttaccggagtacatgataccagttaatttcatgcatattgagcaaattcctattactattaatgggaaattagataagaaggcattgcctatcatggactatgtcgatacggatgcctatgtagcaccgagtacagataccgaacacttgctatgccaaatttttgcagatattttacatgtgaatcaagtaggtattcatgataatttctttgaattaggtggccattcattaaaagcaacgttagtggtgaatcggatagaggcatctactgggaaacgattacaaattggtgatttattacaaaagccaactgtatttgaactagcacaagcgattgctaaggttcaagaacaaaactatgaagtgattccagaaactatagttaaagatgattatgtgctgagctctgcacaaaagcgtatgtatttattatggaaatcaaaccataaagatacggtgtataacgtaccttttttatggcggttatcatcagaacttaatgtagctcaattgcgacaagcagtgcagcgtttgatagcgcgacatgagattttacgaacacaatatattgttgtagatgatgaggttcgacaacgtattgtggcagatgttgcagttgactttgaagaagttaacacgcattttacggatgaacaagaaatcatgcgccaatttgtagcaccttttaatttggaaaagccaagtcaaattagagtgagatacattagaagtcccttacatgcatacctctttatagatacgcatcatatcattaatgacggtatgagtaatatacaattaatgaatgatcttaacgcactttatcaacataaattattgttaccacttaaattgcaatataaagactatagtgagtggatgtcgcatcgtgatatgacgaaacatagacaatattggttatctcaattcaaagatgaagtacctattttaagcttaccgacagactatgttagaccaaatattaaaacgacaaatggagcaatgatgtcatttacaatgaatcaacaaatgagacagctacttcaaaagtatgtagaaaagcatcaaattactgattttatgttctttatgagtgtggtcatgacgttgttaagtagatatgctcgaaaagatgatgttgttgtcggtagtgtgatgagtgcgcgtatgcataaaggcacggagcaaatgctaggcatgtttgctaatacgttggtatatagagggcaaccgtcacctgataaaatgtggacacagtttttacaagaggttaaggaaatgagtttggaggcatacgagcatcaagaatacccattcgaatgtttagtaaatgacttagatcaatcacatgatgcctcacggaatccattatttgatgtcatgttagtactacaaaacaatgaaacgaatcatgctcattttgggcatagtaaattaacacacattcaacccaaatcagtgacggcgaaatttgatttatctttcatcattgaagaagatcgcgatgactatacaatcaatatcgagtataataccgatttatatcactcagaaacagttcgtcacatgggtaatcaatgtatgattatgattgattatattttgaagcatcaagatacactacaaatttgtgatataccaaacggcacggaggaacttctaaattgggtcaatacgcatgttaacgatcgaatgcttaatgtcccgggaaataaatctatcataagttactttaatgaagttgtctcacgacaaggtaatcatgttgcgctagtcatgaatgatttgacaatgacgtatgaaacattacgcaactatgtggatgccattgcgcacatgctcctatcaaatggtgtgggcaatggtcaacgggttgccttgtttacagaacgtagttttgaaatgattgcggcgatgttggcgacagttaaagtaggtgcatcttatatacctatcgatattgattttccgaataaacgacaaggtgcaattttggaggatgctaaagtaactgcagtcatgtcttacggcgttgaaattgaaacgacattaccagtcattcaattggaaaatgctaaaggctttgttgaatcaaaggaaaatgaacaatatgatgatttacatggcaatcaacttgaaaacacagcgatgttagataatgagatgtatgctatttacacatctggtacgaccgggatgcctaaaggggttgccatacgacaacgaaatttgttgaatttagtgcatgcatggtcaactgaattgcaattaggcgacaatgaagtatttttgcaacatgcaaatattgtttttgatgcatcagttatggagatttattgttgtttgttaaatggtcatacgcttgtgattccagatagagaggaacgtgttaatccagaacagttacaacaactcattaataagcatcgtgtgacggttgcgtcgattccgttacagatgtgtagtgttatggaagacttttatattgaaaagttgattacaggcggggcaactagtacggcatcctttgttaaatatattgagaagcattgtggcacgtatttcaatgcctatggaccatctgagtcaacagtcatcacatcgtattggtcacatcattgtggtgatttgatacctgagacgattccaattggcaaacccttatctaacatccaagtgtatattatgtcagatggtttgttatgcggtattggtatgccaggcgagttgtgtattgcaggtgatagtttagcgataggatatattaatcgtccagaattaatggctgataaatggcaaaataatccatttggtaaaggaaagttgtatcatagtggtgatttagcacgttatacatctgatggtcaaattgaacttttaggaagaatagataaacaagtgaaagttaacgggtaccgtattgaacttgatgaaattgaaaatgcaatattagctattcgtggtatatctgattgtgttgtaacagtaagtcactttgatacgcatgatatattgaatgcttattatgtcggagagcaacaagtggaacaggatttgaagcaatatttaaatgatcagctgcctaagtatatgattcctaagactataacgcatatcgattgtatgccattaaccacgaatgacaaggtggatactacgcgtttgccaaatccatcacctatacaacagtctaataaagtgtatagcgaaccctctaatgaaattgagcagacatttgttgatgtatttggagaggtattgaaacaaaatgatgtcggtgttgacgatgatttctttgaacttggtggtaactcattagaggcgatgttagttgtctcgcatttaaaacgatttggccatcatatttcaatgcagacattataccaatataaaaccgtgcgacagattgttaattatatgtaccaaaatcaacaatcattagttgcattaccggataatctttcggaattacaaaagattgttatgtctcgttataacttgggtattttagaggatagtctaagtcatcgacctctaggaaatacactattgactggcgcgacaggttttttaggtgcttatctgattgaagtactacaaggatacagtcatcgcatttattgtttcatacgtgctgataatgaggaaatagcatggtataagttgatgacgaatttaaatgattatttttcagaagagacggttgaaataatgttatcaaacattgaagtcattgttggtgatttcgagtgtatggatgatgttgttttaccagaaaacatggatacgattattcatgcaggtgctcgtacagatcactttggtgatgatgatgaatttgaaaaagtaaatgttcaaggtactgttgatgtcatacgtttggcacaacaacatcatgcaaggttaatatatgtgtctacgataagtgtgggaacttattttgatatagacacagaagatgtgacattttcagaagcggatgtctataaagggcaactactaacatcaccatatacacggagcaaattttatagtgaattaaaagtattagaagctgtaaataatggcttagatggtcggattgtacgtgttggtaatttgacgaatccttacaatggaagatggcatatgagaaatataaagactaaccgtttttcaatggtaatgaatgatttgttacaactggattgtatcggggttagcatggctgaaatgcctgtagatttttcttttgtggatacgactgcaagacaaattgtcgcattagcacaggtcaacacaccacaaatcatttaccatgtgctatcacctaataaaatgccggtgaaatctttgttagaatgcgttaagcgcaaagaaattgaactcgtcagcgatgaatcatttaatgaaattttacagaaacaagacatgtacgaaacgattggattaactagtgttgaccgtgaacaacaactagcaatgatagatacaacattaacattaaaaataatgaatcacatcagtgaaaaatggccaacgataactaacaattggctgtatcattgggcacaatatatcaaaacaatattcaataagtaagtagggaaagttatgacagtatttgtaatgcaattacagagtaacttgaaaagtattgaagaattaatatcacaaagtcgttggtcatataaaaaaccgcgtacagtcaactatagatacaatcaagataaactcatgcacagattgggagatattttagtgcaatatggaattcaacatgacacaggtttattaccacatgaatggcattatcacatttcgccacgaggtaaggcagatattgttcaacacaatcgtgatggacagcccatctatgtgagcttatcatatagttatccttatatcgtgtgtgttgtcgataaagaaccagttggtattgatatcgaaaagatatcacaacgtttagactggcgtacgttagtgacgtgtttctctacaaacgaagcacatcaaatatgtagtttaaatgatttttatcaaatatggacacaaaaagaaagttttacaaaattgattggtgaaggtttaatcaaaggattggacatttatgatatgacacaatcacacttttatcaatcacgtgaagtgaagttcaaacaatttatttttgatcagtttatggtacaggtatgtttcttaggacaggcaccctggggttataaaaaagtgtctgtatttcagttattgagtagttaatatgacgtctgacagtatcattgcgcagtgattttaaactatactgcctaaatgtttactgttagatgtttttttattggaaaaatgaaaggtgaatacacgatggcatcattcaaaatcatgacgagattaaagtaagtgataaggtaaaaatatactgagcaatattgaaattaccgaaaataatagtttgttacgacgcatttgagactttaatgctcacgtaagttggctggaatcatatcatgtcagttaataaaataacgtgagcatcaatcatcatactcaaacgatgatttaaaactcacgttaatgttagtcagtgtattaatttaatttatagcgatagacaaaatgttgtcgcactaattcaattgtcatcatccagacgatatggccaaagaattctgacagatgctcttggaatggttgatcccacacagcaggtacagtatgcatgattggcataatgataaggtggaataatacccaaatagcaataccaaaaacagcaccttgtcccattgctaagtaagcgtattttttaactaatatgcagtaaataattgcaatgacgatagaaaaactaaagtggacaataaagcttacccaaggcaattccatatttgaaaatgtatatgtttgatgcgtaaactcactactaaatcctaattgttgcaataactcttgaggtgggttcgttgcattacgttctggtgtgcgaggtggaaacatgacctcccaacctaattttacaattccagataacaagccaccgataattccagcataaatgaatatacccatttgtcgtttcgtcaacttaaggactcctctctatttactatcctcattatagtattttgtgaaaataatcacaataaaaagctttgcaaaacttaaaatattttgataaacaaatttgtaaaaggttattagttttttacatctcatattgtatcgtactgtattcaaaattgttaacgagatgaacggtaaataaatgttttagcgcaatggataatcgaactggaatcatctcgcgtgtcaaaacttgttaggccttaatttcatagttatgaattaaggattgttgtgccaacaaaatcattattgtaaatagattcaatgatatttggcttgtttcctgatgcaatgataactttaggacagccattttcaatcgcatttttggcatctagcactttgggaatcatacctccataaatatcaccatgttcaatatattgatgaatatcgactaatggcaattgaggtataacaacatcattgatgagtacacctgcaatattacttaatacataaataggcgcttttaatgatgatgcaataaaataggcaagcgtgtcagcattaatattgtaaaattctccatcatggttattgaaaccaatcgaattgatgataggtacaaatttagtacataaatactgtaaagcatccttatttaaagcggtcggaacaccgacatatccatattgttgatcaaaagatgtaatttcaaacagctgtgcatccaaaccacataagcctattgcagaacattggtgctggttaaattgagctactaatgcagtgttaacgtctgcaatgagcgtgtgtttagtaatggtcatggttgctttatcagtcactcttaggccattaacaaagtgtggctcgatttgctggtttgataatgcttcattaataaatgggccaccgccatgaacgataatggggtagatgttgtttgatcgtaaatgcttaatgttgttaataattgatggatgcatgtcactaagtgtactgccaccaattttaatgacaataaatttcatctaaccaacaccaccttatgttcgatatgatgcgttgatacgcacataatcataggataaatcacaaccgtatgcagtcgctgcagcgttacctaaaccaagctgaacgtcaattgtgacattttcatgagttaatgtattcgacatagcttgctcatcaaatagtacagccatacctttatcaacgacaggtatttggttcagttgaacatatgtgcagttaggatcaatttcacatccgctgtagccaatagctgtaatgattcgaccaaaattggcatcttcgccaaaaatagctgattttactagatttgaacttacgatagttttaccgatttttcttgcatctgatattgatttagcgcctgacacattgacgctgattaactttgttgcgccttcgccatctctggctatagctttagctaaaaatgtacagacaaaattgaatgcatcaacaaatgtttcccattgtggatggtcttgactaagtatttggtgttcaacttggtgatttgccatgactaataccatgtcatttgtacttgtatcgccatcaacagtaatcatattaaatgtatggtcagtcgaagattttaataattgatgaagtgtattcgattcaatcgatgcatcggttgttataaaagcaagcatggtagccatatttgggtgaatcatacctgaacctttggtgctaccaccaattgtaacggttttaccatcgatttttagtgatacagcgatatgttttgtacaggtatcagttgttaaaattgcctcgttaaacgcacctggcgttgcaaaattagcatccttaatatgttcggtcccagtcttaattttatccataggcaaatattcaccaatgaccccagttgaagcaacagcaacatgctcagatggtatttgaagttgttgagcaacccatgtttgtgtttgtcgtgcatcatctatgccttgttgaccggtacaagaatttgcattagctgaattaacaacaagtgcttgtaattttcctttagacttttgtaaagtgtcttcagtgacaataagtggtgcagctttaaactgatttaaagtatatacggcagctgcacttgccaaagacgatgagtaaatccatccaaagtcttttttgttagcgcgtaaaccgatgtgcataccaccagccgtgaagccttgaggtgtactgatatcgccatgtttaataattgaaaagttatattgttgtgatgtcgtttcttgatgtttcattctaacaccccttatggataaactggtgattgatttaggccagtcgtcacttcaaaatcatataatatatttaaattttgaatggcttgcccacttgcgcctttgacaaggttatcaatcactgatactaaaattgctgtttgcgttgtttcatctacatagatgccgatatcgcagtagttactaccgagtacttcttttgtggttggaaaagtcccaatatctctaattctgacaaatggctgattagcataataagaggtcattaatttatgtaatgattcagtcgtatattcagatgataatttgacatatattgttgataaaatacctcgtgtcattggtacgagatgtggtgtaaatatgactgatacatcttgacccgcaatgatagataaatattgctcgatttccggtttgtgtttatggtttccgattgcataagcgcttagattttcattcatttctgaaaaatgaacacgttgtgataatgaacgaccagcacctgacacgccggtcttagcatcaataataatagatgacaaatctactattttttcgctaataagtggatgtaatgctaataatgttgctgtagggaaacagccaggattagaaatgagcttcgttccattgttatcaaacgattgccattctgaaatgctgtaaatagcatgattcaaatcatcttgtgctgcagcagtttctttgtaatatgcttcatatatttcacgattcttaattctaaatgcgccagataaatcgataacatgaatacctttttctactaagggagggatacatgttttacttacgggtgctggtgtcgcaaagaaaattacatcacagtcattattgtccactgtaagtgcttcgaaatgttgcataatatgttgtaaatgtggaaatgttaatttcaacggttcatctacttttgaatgtgagtagatgtgtgcaatcgttacatgaggatgtgtttgtaacaatcgaattaattcaattgcgccataaccgctaccgccaacgatacctactttaatcatcatgaatccctcctatgtcatatataaatgattaattgttaatttttaaaaacgtcttgaaaagctgcaacaatttgatggatttcctctttatcaatgactagaggtggagacaatcgaatgatagtacgatgcgtgtctttgcataagattccacgttgaatcagttgatccacaaaaggtgcagcatctgtgttaagctctatgcctataaataaaccacgacctctaatttctttaatactaggatgtttaagttgtagcaacgcttttaataaaaatgaacctaagcgttctgatcgttcaaccagttgttcatctttaagtacatcaagcgctgccgtcgatattgcaatggctaaagggttaccaccaaatgttgaaccatgtgtacctggtgttagaacacgcatgacatcattatttgcaagtacagcagatacagggtataagccgccacccaatgccttacctaaaatataaatgtctggaacgacttgctcccattccatagcaaaccatttcccagttctaccaagaccaacttgaatttcatctgcaatcaataatatttgatgtttatcacatagttgacgcacagcttgaatatatcctttcggtggtatattaacgccaccttcaccttgaattggttccaaaataattgctgctgtattcggtgaaatagcttgtgttaattgttcaatgtctccaaaatctactgttgtagtgccttgaagtagggggtgaaatcctgctttatatgcgtcgtggttagatagtgataatgagccaagtgtacgaccgtgaaaattgttattcatagcgatgatttcaacttgtccgtcagtaatgcctttaacttcagagccccattttctagcaattttaatggctgcttcaacagcttcagtaccagagttaagggggagtactttgtctttcttagcaagatgacaaattttttcttcccatttcccgagattgtcactataaaggacacgtgaaatgatagacaactttgaagcttgttctgtcatcgctttaacaattgttggatgacaatggccttggtttgcaactgaaaaacccgaaatgcaatctatatattgtttgccatcagtatcccaaactttgacacctttacctttagaaatgacaagcttaagtggtgcataattattagagctataataatcagttaattcaatgattgaattcatcggtctccctcctttatatttatacattttaaagaattaatattaatatattacagttgttcaatataagtgtcaaatgtaaatttaataatataaagataaggttgtgtttgtattaatgtgatttgtaaaatgaaagtactaatattttttgtggataatcattgatatgtatgtatacgattgcagtttaatgtagtatgaataaaaaatgccacaagcatatgtttaacatatgactgtggcatagtattatgcttgtggaattttacgatgcttaattttataaataatgaagccgataatgaaaccaatcaaactgagaacaacccagcccataccaatgtctgataatggtaaatatttttggctgaaattaatcaaagtttgtgagaatgatgtgcttgaaatgaactctggactagcttttaatccatctactaatgcagcaatcattgtaaagaaaatggtacattgataaataagttttgaatgatggaatttgctactaaataatgttagtacaatcaaggcaattgctaatggatataagaacattaacactgggactgagtacataataatcttagttaaaccaacattcgcgaataagaacgaaataaagcttacaactgttgcaatcgctaggtaattcattttagggaaaaggtgttcgaatgtttctgaaaatgccgtaatcaaaccgatggctgtttttaaacaagcaaccataacgataagtgacaacaggacgataccgtagttacctaagtagtattgagtaatttgcgctaaggcaataccaccattttcactaagtttgaaatgaccaatacttaatgtacccatgattgctagtagggtataaatgatccccatcataatgatactgatagtaccagacttaattgtttctttagcgatatcagttggattttcgatacctaactttttaatcgttgcaacaatgataataccaaatgccaatgacgctagcgcatctaaggtattgtatccatctaaaaagccgttaaataaggcatgtgattgatattgtttactaataggtgcatcagatatgccacctaatggatggataaaagcaaataataaaataattgctaataatactaagaataccggatttaaaaatttaccgatatattctaaaattcttgatggctttctcgcaaaaaaccatgcaatcacaaagaagacgaagctaaaaataaataaatataaagtgatttgctttggtgataaaaatggcgaaaatgcaatttcaaatgatgtcgttgccagtctaggtaaggcgaaaaatggtccgataactagatataaggcaatcgtgaaaatgtaagcatatgttttattaacacgcgatgcaatttcaaataaaccagatgtctttgaaatgccaatagcaatgatacctagaaatggtaagccaattgctgtaattaaaaatcctaagttagcgataaaaacgttagaaccagcagcttgacccaagtgtattgggaagataagattgccggcaccaaagaataaaccaaataacatagaacctataaacatgttttctttaaatgttagtttcttcttcatatatgtatttgttctcctttttagaacttataaaaatctacttaattaagataatatcaaaaattaaacataaagtgatacataattttgcaataaatactaaattttttgaaaattccggaataaatactgttttttatgtagtaggggcgtaagttaagaacgatttaacagatatagaatatgttaaatatagaaggttagacaacccgacgtattaatactttgtgaaataaagatccccctcaacatgatcgaaggggggaagtatatgtttagttcaatatatttagaaagtcgtttgtagttattgtttgtcccatcaatgggaatacattatctattggaaattgatgtagcgtttcgttttgtgcactcatcatatctgtaacaaaaaactgattgtagtttaattgataggcatctcgcgctgtcgtatctacgccaatatgcgttgcgacaccaccaagaacaatcgtatcaattcctcgacgtcgcaattgtaagtccaaatctgttcctacaaatgcactaaaatgtcgtttgtctatgacaaaatcgtcatctctcttgtctaataaatgatggaaacgactgtagtcgtcgccttcttttggtggtaatgagatcattgcatttggttgcaatacatctttaccatcatagaaattcacgcgaacaaaagcgataaagccattgttttttctaaaaacatctattaatttattagcgttttgaacgacattttcagctgtatatggggcataatccattttaagaataccttcttgcaggtcgattaacactaaagcggttttattaaaattaatcatcttatatcagagtcctattcgtttaataaagtattcgcttaaacttataccctgtatacgatgaaattatttattttgttgtgaaaaagctttagcgatatcgatgagtttcttcggtgcgtcttcgacagccattttgacttcgacaaaatgcatcacatcgggatgaccattaattgcattaaacgtgtcttgtaaatcttttgatgattcaacgtcatgaatttcaacatttttaccaccaaatacagctggtaaagctttataatcccacatgtgaatttcattataaggttcatacatgccgtgaataagtcgttctaccgtatagccgtcattattaatcacaaataataccggtttaatatgctgtctaatcatagttgaaatagcttgaacagttagttgcaatgagccatcaccaattaataataagttacgacgatctttgtctgctaattgtgaacctaatgttgcaggtaatgtatagccgatagaaccccataacggttgccctataaaagtattgtttttgtataatgctaaatcataagcaccaaagaatgatgtaccttgatcagcaatgatgacatcatttggttttaagaaattttgcatcattttaaaataagtttgttgtgttaatggttctgtgccaacagtataatcgggtgatgttggacgatgatacgcagggaacgttgcgttattcgtatatgaaatattggataactgttttaacaatgatggtagagatatttcatcatttgtaacatcgtcaattttgatattgtgatgatttaacataacgacatcatcgatattgaattggtatgaaaaacctgctgttgctgaatctgttaatttggctccaatatttaaaattaaatcgctgttgtccacataatctcgtattttatcttcggcaattttcccatcgtaaatacccatataatatggattttcctcattaaaagcaccttttcctaatgaaagttgtgctactggtatctgtgtttgatttacaaaatcttctaattcttgatggaggtgaaaactgttaatttcatgtccagtaatgatgataggctgcttcgcttgatgcagtttagttgctaataactctatatatgttgatgcatccgtatatttagttgccgtcacttcaaatggtgtcggtatctcaatttcagagattgcgacatcgattggtaaatgtaaatgaactgggcgtctttcggcgattgctgtattaattaaacgtggtatttcggttgttgcattttcaggtgtgatataaccttgtgcaacggttatatgtgcaaacatttttcgatagtcgtcaaatgtaccttcaccaagtgagtgatgtacatatttaccgccttgttcaacagcacgtgtcggcgcacctgtaatcgcaatgacaggtatgcgttcagcatatgaacctgcgataccgttgacggcacttaattcgccaacaccaaatgtagtaactaatgcagcgagtccattaagacgggcataaccgtccgctgcgtaacttgcgtttaattcatttgtatttcctacccaatctacattgggattgctgataatatcgtctagaaaagcgagattaaaatcaccaggaacaccaaaaattttatcgacgcctgctcgatgaatagcgtcaattaagtaagctccaatgcgttgtttcataaaaaaagccaccttttctctatatttacacttaaaatgatagcctcgaatatagtgtaaggtcaaggaagttgactttgttgtgaaaacgctaacaatagtgaacaattaatattttttaggaaatgagtatgaaggggggctttaattgatgatcttaaaattcaaaatttaaggggagagcgaactatcaatgatgctgcaaaatacaatagcaaagaaaaaacaggcgcgtcaccttatgaaggtatacgcacctgtttatagtaagcattatttagcttcaaataattgatcgccaaatgaaatgttgccatgttcaccttgtttaaaatcaaggtttgtaatgtttccttgtgtcacgataataggcgtaatatcactctttgcatgattgcggatgtagtctaaatcaaagttgattaataaatcaccttgtttaacttcttgaccttcctcaacatgtaaagtaaagccttctccgtttaatttaacagtgtctaaaccgatgtggattaatagttctaaaccactatctgatacaagaccaattgcatgttttgttgggaaaatcatttgtactttaccgttgaatggtgcacgaacttcaccttgtgaaggtttgatagcgataccgtcacccatcattttttcgctgaacacttgatcaggcacttctgataatggtgttacttcaccagttaatggtgcatgcacgatatggctcaattcgcttgttgcagatttatcttctgcaacaacaacagtttcgtctttatcgtcttccatagtagtaggattttctactacttgaccattcataatctgttgcatttcatgtttgatttggtcagatttaggaccaaaaattgcttgcatattattgccgacttctaatacaccagatgcgcctaaatctttcaaaccaggaacatcaactttagatttgtcgttaacttcaacacgtagacgtgtgatacaagcgtctaaatgtttaatgtttgctttgccacccatagcttctaatactgcatatggtaattcagttgctgaagcagtagccgcttgtgattgtttatcttcacgacctggtgttttgtattttaattttacaattaagaatcggaatacgaagtagtaaataactgcgtatacaagacctacaggaatgactaaccaccattgtgtcttattaggtagtataccgagtaagaagtagtcgatgaaaccacctgagaatgtataacctagatgaagatctaataagtacaatgttaagaatgataaaccatcaagtactgcgtgaataaagaataataatggtgctacaaataagaatgagaattctaatggttctgtaataccagttaagaatgatgttaaagcagcagaacccattaaacctgctactactttcttattttcaggtttagctgtgtgataaattgctaaagctgctgcaggtaaaccgaacatcataacagggaattcaccttgcatgaatttaccagctgtcaaatgtgcgccttcacgaatttgttcgataaagatacgttggtcaccgtgaataatttcaccagctgcatttttccatgaaccaaactcgaaccagaacggtgcgtggaaaatgtgatgtagaccgaatggaattaataaacgcttgatgaaaccaaataagaatacggcaacaccagtatttgaatctaataatcctgtactgaatgcatttaatcctgattgaatcgttggccaaattaatgccattgggaatgctaaaataaatgatgttgtagccatcataataggtacgaaacgcttaccagcgaagaaacctaaataagatggtaagttaatgttatagaacttgttataacaccaagctgccagggccccgattataataccgccgaacacacctgtttgtaatgttgggatacctaaaatgctagcgtaaccactcgctggatcaccaatattcttaggtgtaacttgtaaaaagtcgcccattgttttgttcatgattatgtaaccgacgaatgctgcgatagctgctacgccatcaccgccagctaatccgattgcgacacctaatgcgaaaatcataggcaagttatcaaaaatgataccaccagcacctgtcattaatttagcgacagtttgtacgccaccattttgtataaacggcaagtagtgttgtaatgattcaccttgcatagctgtaccgatagctaataacagaccagctgctggtaaaatcgcaacaggtaacattagcgctttaccaatacgttgcaattgaccgaaaagtttcttcctcacttgtccaacctccaaagttgtatttattatttaagattcaataaaaaaagacacgagcaaatagactgtgttggtaaccatcacagcttaatttaactcatgcctaatcttacttagtaacacgttggtgtatgtaattaatgtaaaagaagcaattgactaagtagtatataaaactgatacgttagtttatctagcttaccatcacatcttattgaatcttatttgtttgcgactcctattttagcatggtgaagtatgcgttttcaatacaattattaaattcaatttcaaatctcttaattgttcacagattattattaaaacataatataagataatcctgaataaaatgtataaaagttattgtaataatccagcagtagcagctattatcagcacttaaaagaaaggataatctttgatggtgtaataattaacttgtgacagaaatatgtaagattattacaatgaacaggctttaactgattaatattgtaatgtgttttctcttatagtaaaatgtaagcgattacacaactcaactatattttcctaataattatattgttaaggagggctactttgacaggcttttcagtgtatttaggacaacctttagatgaagcgtatattaagcgaatgattaaacaaggttaccaaatgatttttacatctgtacaaataccagaagaagatgacgagacaaaatatcattatttcacaaaactactcaatttattaaaacatgaacaagtgacttacctcatagatgctaatccatctattttaacaccatctttttatgaccatcttcgacaatatgatgcacaatttatgattcgtatcgatcatagtacatcaattgaggcaatcgaagcgataatggcacagggtttaaagtgctgtttgaatgcaagtattatttcccgggaattgttaacaagcttacatcaacaattgaatgattttacattactttcattttgtcataactattatccaagaccagatacgggattatctgttgacttggtcaataagaaaaatgaactcatttatcaatttaatccaaaggcacaaatatatggttttattgtagggagtgatttgcgaggtcctttgcataaaggcttgccaacaattgaagcaacgagacatagtcatcctgtcgttgcagctaaattattacaagaaactggtgtatctgaagtgttagttggagactcattgattgaaatgaggcaggcaaaacaacttatagatttttgcaagcataggcatttcacgttatgtattgaagaagtgtttgatacgacagtgacttaccttttcgatatgtgtcataaagtacgcccggataatccggaaaatgtcattcgttcggaaacgtcaagacaaatatgtccacattcgattcaaccacagtttacgacgcaacgacgcattggttcagtaaccgttgataatttgaataacggacgttatcaaggcgaaatgcaaattgtgagacaaacgcttagtgcacatgacaatgtgaatgttgttgcacaaattattaaagaagacttaccactgttaagttgtatcgagccgaatgatacatttgattttcaaaaaactagggagtgtaagaagtgatggaaaatagtacgaccgaagcgcgtaatgaagcgacgatgcatcttgatgaaatgactgtggaagaggctttaattacgatgaataaagaagatcagcaagtcccgttagcagttcgaaaggcaataccacaattgacaaaagtaattaaaaaaacaattgcacagtataaaaagggtggacgattgatttatatcggtgcaggtacaagtggaaggttgggtgtcttagatgcagcggagtgtgtacctacattcaatactgaccctcatgaaattataggtattattgctggtggacaacatgctatgacgatggctgtagaaggtgcggaagatcacaaaaaattagcggaagaagatttgaaaaatatagatttaacatcaaaagatgtcgttataggaattgccgcgagtggcaaaacgccatatgttataggcggtttaacatttgctaacacaatcggtgctacaacagtatctatttcatgcaatgaacatgcagttataagtgaaattgcgcagtatccagtagaagttaaagttggtccagaagtattaactggttcaacacgtttaaagtctggtacagcacaaaagttaattttaaatatgatttcaaccatcacaatggttggtgtcggaaaagtttacgataacctcatgattgatgttaaagcaaccaatcaaaaactgatcgaccgttcagtgcgtattattcaagaaatatgtgctatcacatatgatgaagcaatggcgttatatcaggtatctgagcatgatgtgaaagttgcgacagttatgggtatgtgtggcatttctaaggaagaagcaacaagacggttattaaacaatggtgacattgttaaacgagcaatcagagatagacaaccttaggagggatttaaatgaccaaagaacaacaacttgcagaacgaattattgctgcagtaggtggtatggataatatagatagtgtcatgaactgtatgacacgtgtgcgtattaaagtattagatgagaataaagtagatgaccaagaactaaggcatattgatggtgtcatgggtgttatacacgatgaacgcattcaagttgtggttggacctggtacagtcaataaagtggctaatcatatggcggaattaagtggtgttaaactaggtgacccaataccacaccatcacaatgatagtgaaaaaatggactataaatcatatgcagctgataaagcaaaggcgaataaggaagcgcataaagcaaaacaaaagaatggtaagttgaataaagtattgaaatcaattgccaatatctttataccgttgattcctgcatttattggagctggattaattggtggtattgcagcagtactgagtaacttaatggtggcaggctatatttcaggtgcttggattacgcaacttataacagtatttaatgtcattaaagacggtatgttagcatacttagctattttcactggtattaatgcggctaaagaatttggtgcgacaccaggacttggtggcgtgattggtggtacaacgttattaacgggtattgctggtaaaaatattttaatgaatgtcttcactggagaaccattgcaacctggacaaggtgggattattggcgttatttttgccgtttggattttaagtattgtcgaaaagagattacataaaattgtgccaaatgcgattgatattattgtaacgccgactattgcattgttgattgtaggactattaactatctttatctttatgccattagcaggttttgtttcagacagtttagtttcagtagttaacggaattattagtattggtggcgtatttagtggatttatcattggtgcaagcttcctaccgttagttatgttagggcttcatcatatttttacgccaattcatatagaaatgattaaccaatcaggtgctacttacttattgccaattgcagcgatggctggtgctggacaagtaggtgccgcattagcactttgggtaagatgtaaacgcaacacaacattacgtaatactttaaaaggtgcattgccagttggtttcctaggtatcggagaaccattaatctatggtgtgactttgccattaggtcgacctttcttaactgcttgtattggtggtggtattggtggcgctgtaataggtggaattggacatattggtgccaaagcaataggcccaagtggtgtgtcactattaccattaatctcagataatatgtatttaggttatattgcaggattacttgctgcgtatgctggtggattcgtttgtacatatttatttggaacgacaaaggcgatgcgacagacagatttgttgggtgattaatgatgacaaatattttatatcgcattgataagcagttgagtgattttacgaagacagaaaagataatcgctgattacattttaaagaatccacataaaatcattgatatgactgtgaatgatttggcagatgttacgaatgttagtacagcatcaattgttagatttagtcggaaaatgacacatcaaggttttcaagagctaaagattgcgatatctcgatacttacccgaagatattgcaaccaatccacatttagaattgattgaaaatgaatctgtagaaactttgaaaaataaaatgattgctagagcaacgaatacgatgcgatttgtagctactaatattatggatgcgcaaattgatgcaatttgtgatgtgttgaaaaatgccaggacaatatttttatttggatttggcgcatcgagtttgactattggtgatctttttcaaaagttatctcgtattggcttaaatgtcaggttattacatgaaacgcatttacttgtgtcaacatttgcgacgcatgatgatagagattgcatgatttttgtgacgaatcaaggtagtcatagtgaattgcagtcaattgcacaggtggccacacattacagtattcccatcataactatatctagtacagctaataatccagtggctcaaattgcagactatgcattgatttatggcagaactgatgaaaatgaaatgcgtatggcggctacaacgtcactatttgcacagttattcacggtagatatattgtactatcgatttgtagcattaaattatcatgcgattctagattgtataacccaatcgaaaatggcacttgataattacaggaagcatcttgcgacgatagattttaaacattagatattgtgtgcgttctaacataaagttagttgcaacgtaaacaattgaagtttttgatgtgattcagttgcttgatgaaaaattgttgctacaagtttgtaaaactggcatagaggctattttgaaaatgataaaggcgtgacaaattaaagcaaagttcagatttgagctttgcttttttcatagatggaaattaaatgctgaagaataattttaatgctaaatgaactaatacgaaggtgctaaaagcaattattatcaaattagtgatatgaatgaaatgtttaaatcgtttgcgttgattgtattcgggacttttatagagtaggtagtagtacataaagagtatggctgcgaacatgccgaatattgaagtgaagttacctacagtgactgccatgtaatgatttaaagttaaatagtaacttagactaataataaaaaataaaatgatttgataggtaattaacaccattcaagtccctccattaatcgtagacaaaaaatttatcaatgatttgattatttgtattcaaattttagtatacgacttacctcaaagacaaatattaaaagataagacaataaaattagaataaatttacgtttgaagataaaaaacaaacatttttcattaaagtttatgatatatttagagcaatagaaagtgtatggaaggggatatgaatggcataccaaagtgaatacgcattagaaaatgaaatgatgaatcaacttgaacaattgggttacgaaagagtaacgatacgtgataataagcaattgcttgataattttagaacgattttaaatgagcgtcatgcggacaaattagaaggcaatcccttaacagataaagaatttcaacgtctgttaacgatgattgatggaaaaagtattttcgagagtgcccgtattttacgtgataaattaccacttagacgtgatgatgagtctgagatttatttgtcgtttttagatacgaaaagttggtgtaaaaataagtttcaagtgacgaatcaagtatctgtcgaggatacatataaagcacgttatgatgtaacgatattaatcaacggactaccccttgtccaagttgaattgaaacgtcgaggtattgatattaatgaggcgtttaaccaagtaaaacgttaccgcaaacaaaattacacaggcttattccgctacatacaaatgtttatcattagtaatggtgttgaaacgcgatacttttctaataatgatagcgaactattgaagagtcacatgttttattggagtgataaacagaataaccgtatcaatacattgcaatcgtttgctgagtcatttatgagaccttgtcaattagctaagatgatatcgcgctatatgattattaatgaaacagatagaatactgatggcaatgcgtccgtatcaagtgtatgcggtagaagcacttattcaacaagcgactgagacagggaataatggatatgtatggcatacaactggaagtggtaagacgttgacttcttttaaagcgagtcagattttatcacagcaagatgacattaagaaagttatctttttggttgaccgtaaagacttggatagtcaaacagaagaggaatttaataaatttgctaagggtgctgtagacaaaacttttaatacctcgcaactggtacgccaactaaatgataaaagtttgccacttattgtaacgacgattcaaaaaatggctaaagcgattcaagggaatgcccctttattagaacagtataaaacgaataaagttgtatttattattgatgagtgtcatcgcagtcaatttggtgacatgcatcgtctagttaaacaacatttcaaaaatgcccaatactttggattcactggtacgccacgttttccagaaaatagtagtcaagatggtagaacaactgcagatattttcggtagatgcttacatacgtatttaattagagatgccattcatgatggtaatgtacttggtttctcagttgactatattaatacttttaaaaataaagctttaaaagcagaagataacagcatggttgaagcaattgatacggaagaagtatggttagcggataaacgtgtggaattagtaacacgacatatcatcaataatcatgataaatatacacgtaatcgtcaatattcaagtatatttacagtccaaagtattcacgcgcttattaaatattatgagacatttaagcgacttaacaaaaagttggaacaaccgttaacgatagctggtatatttacgtttaaacctaatgaagatgatcgtgatggtgaagtgccatatcattcacgtgaaaaattagagataatgattagtgattataataaaaagttcgagacgaatttttcaacagacacaactaatgagtattttaatcatatttcaaaaaacgttaaaaagggcgttaaagatagtaaaattgatatcttaatcgttgttaatatgttcttaactggttttgatagtaaagtactgaacactttatatgttgataagaatttaatgtatcatgatttaattcaagcgtattcacgtacaaatagggttgaaaaagaatcaaagccatttggtaaaattgtaaactatcgtgacttgaaaaaagagacagacgatgcactgagagtattctcacaaacaaatgatacggatacaattttaatgcgcagttatgaagagtataaaaaagaatttatggacgcttatcgtgagcttaaaatgattgtgccgacaccacacatggttgatgacattcaagatgaagaagagctaaagcgctttgttgaagcttatcgtttattagctaaaataatattacgtttaaaagcatttgacgagtttgagtttacaattgatgaaattggaatggatgaacaagagaatgaagactataaaagtaaatatttagctgtgtacgatcaagtaaaaagagcgacggctgagaaaaataaagtatccattttaaatgatattgatttcgaaatagaaatgatgcgtaatgatacgattaatgtgaattatattatgaatatattgagacaaattgatcttgaagacaaagcggaacaacgtcgtaaccaagaacaaattagacgcattttagatcatgcagatgatccgacattgaggttaaaacgagatctaattagagaattcatcgacaatgttgtaccttctttaaataaggatgatgatatcgatcaagaatatgttaatttcgaaagtattaaaaaagaagcggagttcaaaggatttgctggagagagatctatcgatgaacaagccctaaaaacaatttcaaatgactaccagtatagtggtgttgtaaacccacatcaccttaaaaaaatgattggtgatttgccattgaaagaaaagcgtaaagcaagaaaagccattgaatctttcgtggcagaaacaactgaaaaatacggtgtgtaatgattcagccccctcgctagattagtgtagggggcattattattttctatcttttgttagttaccatgtgtttggcaaccatcatttggtttcaatacaattttataatcgtatgtgtatagaaataatgtctataggcatttaaaatagtttataatattaacaggataagtattaaatgtatgttgaaggaggtgcgtagctatggataatagaaatatgattaatcgtgtttttagtcaaaagatattacatcaaattgcaatcaaaaataaaagtgatgttgttgatgaggcatatgatttttatatacagggacctaaaaatatcaatgtaatacagaagatgaaatctttatataactatcttaaaaagtcttatcgtaacgaatatttttacaaaaacacaatacttaataaactccttctaggacgacattctattaatacaactactgcactttctgagatgcccatagggaaaagtattgctgattttatattgttaaacggcaaaggcgttgtctatgagattaaaacagaattagataagctggatagattagataatcaaattaatgattattatgaagtgtttaattatgtcgtagttattacaaatgacaaacatctgaataaagttatggctagatacaaagatacaacagttggaattttagtgttaacaactagaaatacactgagtgaagttcaaaaacctaaagaaaacaatagtctcttaaacacaaaagcgatgtacaactttttacgaaaagaagaaagaaaaagagttattgcacaaaatcatatggatgtgccaacttataatgatttcacagagtatgatgtgttatttgacgtgtttaaagaaataccaatgacgaaactgcataacaatatgatttctgagttgaaaaaaagaggaaacatgaaagaatacaaagatgaatttttagcagcgccggctgaaattaagttcttgttatatttcgcaaaaatgacaaagaaagataaaaataaactatatcattttcttaaggaggattaatatgtattatccttatttgcgtgggaaacaaaatgaactatttgcaattagagaattgttagagaaaggtttgattggtgattgtattcaacctataattgaaccaattaaatatacaaccacatttaaaaatactttgcaatactgtggtgaaaaagcattctctataaatttagtagtaaattcaaagttaactgaagaagagattagtaacgaaactgttgcacatttaactgaaataataacaaaaaacaaaagtgttattcaaaaagcttacttgggtccttctgatgaaggcaatgataggttgaaacagcaattttcaagtaatagtttagctattttaacaagtgtagatgattgggaaatgtttggagataaaaataaacttgaaatggtttttgtaccagatgatagacacattaaacgtaaattgcgtaatattccaaacaaaggcatcattatggatccttttaataaactaagtcgtaatgttgattatttagataatgatgacgagttttatagcgacgatcacctttattataaggaagatggatacgtagcattttcagactattctgttataggtggagaatatgtagacggtggcttttcgccattagctattgcgatacatattgtctattttgatgaggctaatgagctaagagttaagcattttgtctctgattctaataatgatagatcaaatccaggtaaaaagttttttgaggctgtagataaattagtaacatggtcaaaaaacttagatattaaaaatagatcttatgcgcttggacaatttgaagaattaaatgaaaataataagtatccaggattaggtttaattaaaaggttatctatcatgcatcacctagaaattatgaatagatacttggagtctcaaaatgaaaatatgtgaaaaatgttttaataatactgaaatcgtagaaatcattgcaaatgataatagcaaatttgacaattgtgatattgataacaatcatcttggtgttaaaatatttgatacgactaaggacatagataaattagaacttattagagattatttaagaccagcattagaattatatgatattagtataaatttaccagatacttttagcccaaaagaaggtaaaaagattgaaatagcattaaaagacgactggagtatatttaatgttgaggaagctcaaataagttgtattttaaatgaactttttaaagatgatgaaaatttagatagacgagtgttggaagatttagtaggcgctaaaatcataaacgataaaaaatatacaaataaaaatctaattgtagcaaataatgactgggatggattttgtgagagcttgaagtataaaaatagatttcataataatatgatcaatttagagaatttagcgttctttctcgatatcactactaattactatagtattgaggaatttagagaaagatttgaaccattatatagatctagaatagttaagttcattacagagaaaagtgaactaatgtcaccaccaaagggatttgcaacggcaggaagattgaattctaaatggataagcgtattataccttagtacaaaagaacaggtcagtatagaagaagttaaacctaagcataatgacattatttatataggtaaggttaagttacaaaaaaacgtgacaaaagagaaattgaaaattgcgaatttaactaatttaactagtaatgcaatcaaagctggcgatgatggatttagaaagtattttgtaaattaccaaacattaaaaaagattcataaaggaataacaaatccaagcgatgaacaaggaatagattatttgccatttcaatatttagctgattatattcgaagccttaaatatgacgggataatgtatgagagcatattacaagatggtacttttaactttgtgttttttgatcaaagtttatttgaatgtgttaattatgaaagaaaaagagtaagtgacgttaaatatacattgactaagctaagttgacacactcaaaaatctgaatattctaataaaatataaataatcccccgcacttcacatagtggcgggggatttattctggcgttaaaatgcccaaagtatgggggtgactcttaaatcatggcaaagcacctaaaacttgatatggtgccgagccctaacttagcacaatatagttagtatgacaaagtcatctaacataacacatcagaagtcgcgcaatttatttcagaccatacagtgataaagttgcacaacgcatgacttttatttagcaataactgctacttctgaaataagttgctttgcatagtctgactgcggatgtttgataatatcttctgtgttattcagttcaacgatttcgccatttttcataactgcaacgcgatcacatatttcattgataacacccatgtcatgtgtgatgaataaataagtgatgccgaagtctaactgtaattgttttaataactcgatgatatctttttgaattgaaacgtctaaagcggacactgcctcgtcgcaaacaatcactttaggttcaacagcaagtgctctcgcgatacttacacgctgacgttgcccaccagataattcgtgtggatagcgatataagaaagtttgatctaggccaaccttttctaacaacgatacgacagttttaataatgtcatcattatctttgactttcccatgaatgattagtggtcgtttaatcacatcaatgactttaaatcttggattaatagatgcgaatggatcttgaaaaatcatttgtatctcttgtcgtaaagatttcaattcatcatctttaaataaacttaatggtaattcgttataccaaataaagccttctgacacttcctttagaccgacgaccgtcttagctaatgtcgatttccctgaccctgattcaccgacaatgcctaatgtttcgccttttctaatagccaagttaatatcattaactgctcggtataggctgccactcggtgatgtgtaatccacgctcacgcgatcgaattttaataaaatatcattgtttaacggtcttggcggacgcgtttgatgaatatcaggaatcgcatctattaagcgttttgtataggtatgttgtggcgatttaaaaatactttcaaccgtgccactttcaacgacacttccatctttcattacaatcacatcgtcgcaaaattgatacacagcgcctaaatcgtgagtgataaaaataatagatgtttctgtgtactcataaagggacttcattaactgcagtaattgattttgtgtactggcatctaatgccgttgttggttcatctgcgattaaaatttgtggctttaaaatcaatgccattgctatcatgacacgttgacgcataccaccagaaagttcatgtggataagcatcaaattgtcgagttgcatgttttatacctactttttctaaaatgtctattgtcatcgactttgcttcagatttagatacacgtttatgttgaaatattacttctgtaatttgtttgccaatcgttaatcttggattcaacgaagagagtggatcttgaaaaatcattgaaatatccttacctcgaatttgttgtaacgctgaagttgataaattatttaacgattgcccattaaaaataatttctcctgttaatgtgtgatctggataatctggtagtagccctaaaatagatttagcggtaatactttttcctgatcctgattcaccaacaatacctaggatatgtttttttcgtaattcgaaagagacgttttttaccgcttgaactgtagtttcatcataattgaattgtacattcagactgttgacttctaataaatttgacatgatgttgtgcctccctattcacaaatgtgtaaatttattctatacttttgtatatcatagtaatctactcaagattattttacaaggagtgattatcataattacttatttagaatcttttaagtcgttgtatcacaaggcattttacaagtttgtattatcggtattaagcttgccaatatttttatatgcagtgataaagtttttcttttctgctaagaggaaaaatttttacgctaataattctgaaatttcagaaattgaacaggcgttacatcaaaaatataaatatttatcgcagcaaaagtcatccacacaaatacataaagaagcattaaaaatattcaaggcacaaagttctaatacgagttcaaagaatattgaacaagcacatttttcaacatactttgaaaatgtattatttcataagttcatcatgatcaaagtgatattggccttgccgatgttcatcttattgactttttatttacagccattagttagatatatttttgaacgaattgtcatggctgtgattgtcatcattggtgttattgtcagtgtgtttaccattctgtatttttcaccgcttgatgcggcttatagcatactgggacaaaatgcaacaaaggcacagatacatcaattcaatgtattacatcatcttaacgaaccttattttattcaattgtgggataccatcaagggtgtttttacctttgacttaggtacgacttacaaagggaatgaggttgtgactaaagcagttggcgaaagaattccaattacaataattgtcgcagtattagcgctaatggtggcattaattattgcaataccaattggtattatcagtgcgatgaagcgaaatagttggcttgatatcacgttaatgataattgcattaattggtttatctattccaagtttctggcaagggctattattcattttagcgttctcattgaaattggatattttgccaccatcttatatgccagaacatccaatatcgttgattttacctgtacttgtcattggaacaagtattgctgcttctatcacgcgtatgacaaggtcttctgtacttgaagtaatgcgcagcgattatgttttaactgcttatgcaaaaggattatcgacgacacaagttgttattaaacatattttgaaaaatgccattattccaattgtaacgttagttggtcttctagtggcagagttactaggcggttcagcagtgacggaacaagtatttaacattaatggtatcgggcgttatatcgtccaaaaacaactaatacctgatattccagcagtcatgggtggggtcgtatatatatcaattgtaatatctttagcaaacttaattattgatatattttatgctttaatcgatccaaaattacgtagtgaaatcaacgaaaggaagtgaggcatatggcacaacttaattcaaagatagcttccttaaaattattcgcaagttacgccatagcaacttatattttagttatattaacgagtgcattaaatctttttaaaggttatgtggccgatacgttctatattgctgaaacattgctaatcgttttaaccatcattttaattattattttaacaacggaacaaacatggaagcatcatgacctatggcgacgtatcgtcgaagtgttgttattgttgatgacattaacaggcaacgtatttacattattaatgtttgtaagtattagacgttaccaacgtacatcgcaaatacatagttataacgggtgggaatcgtttatacgaaaaactactagacatcgtattgcgattatcgggttacttattttagtctacatgctgacattatcaattgtgtcacaatttacatttgatacgacattggctactaaaaatcagttcaatgcactgttacatggaccgagtctagcctatccgtttggtactgatgatttcggtagagacttatttacacgcgtagttgtaggaacgaagctgacattttcaatttcaattatttcagtagttattgcagttatttttggtgtgttactaggcactatcgcaggttattttaatcatattgataatttaataatgcgaattttagatgtagtgtttgcaattccatcattattgttagcggtggcaattattgcatcatttggagcaagtattccaaatttaattattgctttaagtatcggtaatataccatcatttgcacggacaatgcgtgccagtgttttagaaattaaacgcatggaatatgtagatgcagcacgtatcactggtgaaaacacttggaatatcatatggcgttatattttaccgaatgcgattgcgcctatgattgtacgtttttcattaaatataggtgtggttgtattaacaacaagtagtttaagtttcctaggacttggtgttgcacctgatgtagctgaatggggcaacattttacgtaccggtagtaactacttggaaacgcacagtaatttagctattgtacctggtgtttgtattatgttcgtcgttttagcatttaattttataggtgatgcagtgcgtgatgcactagatccaagaattcattaaaaaggtagggatagatgtgaagaaaatcattagtatcgcaattatagttttagcgttggtattaagtggttgtggtgtccctacgaaatcagaagtggctcaaaagtcatcgaaagttgaagtgaaaggcgagcgaccaacaatacatttcctaggacaagcaagttatgaaaatgatatgaatatcgttaaagatcaattggaaaatgcaggatttaacgtgaagatgaatatccaaccagattatggtagctatcgtacacaacgtcaagccggcaattatgatatccaaattgatgactggatgacagtgtttggtgacccgaactatgctatgacggcattatttagttctacaggatcaaatagtttattgaaagataaacatgtagaccagttgttaaataaagcttctactcaaaatgaagcagatgttaaacaaacatataagcaaattgaagatgaagttgtatttgataaagggtatatggcgcctttatatggatcaaaaaagaatttagtatatgacaataaagtgttagataaaaatagtgttggattgccaaattcacgtgcattaatatggcaacaatttgattacaacaatagtagagaacgagatacgcggccacttgtgatgacacaacaagatggtgaaattcctacattggatccaatacgttcaattgcgccgtcagtatattcaattaatatgaatatgtacacaaggttattattattagatgaaaatgatcatttaacaacgaaaggttcgttaagtcatgattatgctgtgaataaggacaataaagcattttatttcttgttaagagatgatgattattttgcgaaagtggtcaatggacaagcacgtaatactggagagcgtgtatcggctgaagatgttaagttttctttagatagagcacgtgataaaaagtctgtgcctaacaataatacttacaatatgcacaaacatataaatgacatcaagatattaaaagatgaggacatcgatcagttgcgtaaagagaaagacaaggacgataaatcaatctatgataagttgattaaagcttataacgtcaaatcgttaacgacagatggtcaaaaagtaaataataaagacggtatttatcaaattgttaaaattacgacagatcaatcgatgcctcgagaggtaaattacttaacacactcttcggcaggcattttatctaaaaaatttgttaatcaagtaaatcaagaatatccaaaaggatatggggatagcagtacaattcctgcaaattcagatgggaaaaatgcgctgtatgcaagtggcgcatacattatgacacagaaaaatgcatatcaagcaacgtttcaacgtaatccaggattcaacgaaacagaaaaaggtagttatggaccagctaaaattaaaaatattacattgaagtttaatggtgacccgaataatgcattgtcagaacttagaaatcattcaattgatatgttggcagatgtgaatcaaaaacattttgatttaattaagtcggataaaaatttaagcattattcgcaaaaatggacgcaagtcagtctttttaatgctaaatattaaaaaaggtatatttaagacgcatccaaacttgagacaagcagtagttaatgcgatagatcaggatcaatttattaagttttatcgtggcgataaatttaaaattgcatcaccgattacaccacttgtcgatactggtaacgagcaacgtcaagatttagaaaaagtagaaaaagccattaatcaataatgttttaaatatttaacagaaagtaggaggatatagtatggtcattaacttaaatgacaaacagacaaaaacatctaaagaagggttaatttccgtatcacatcctcttgcggctaaaattggtaaggatgtattagatcaaggtggcaacgccatggatgcagtgattgcaattcaactggcattgaatgtgttagaaccatttgcatcaggtattggtggtggcgggtatttgctatattatgagcaaagtactggcagtataactgcgtttgatgcacgtgagacagcacctgaacatgtagacaaacaattttatctagatgattcaggcgaatataaatcattttttgatatgactacacatggtaaaactgtcgctgtgccagcaattccaaagctgtttgattatattcacaagcgttatgctaaattgtcattggaagatttaattaatcctgcaattgaactagccattgaaggtcatgcagccaattgggctactgaaaaatattcgcgccagcaacacgcacgattgacaaagtatcatgaaacggcacaagtatttacgcatgaaaatcaatattggcgtgaaggtgattggattgtacaacccgaattaggtaagacatttcaaatattaagagaacaagggtttaatgcattttataaaggtgacattgcgaaacaattagtcaatgttgtcaaagcatgtggtgggacaatcactttagaggatctagccaaatatgacattcagattaaagcgccaatcagtgcaacatttaaagactatgacatttattcaatgggaccatctagttctggcggtatcacggtaattcaaatattgaagttattagaacatgtcgatttaccatctatgggtccaagatctgttgattacttgcatcatttgatacaagcgatgcatttagcatatagtgatcgtgcgcaatacttggcggatgataattttcatgaggtgcctgtacagtcattaattgatgatgattatttaaaagcacgcagtacgctcattgatagcaataaagcaaatattgatatagagcatggtgttgtgtctgattgcattagtcatacagatgttgaagaaaatcataccgaaacaactcatttttgtgtgattgataaggaaggtaatattgcttcatttacgacatcaattggtatgatttatggttcaggtatcacgattccaggctacggtgtgttattgaatacgacaatggatggctttgatgtagtagatggtggtattaacgaaattgcaccatataaacgaccactaagtaacatggctccaacgattgtgatgtatcacgggaagccaatattaacagtaggtgcacctggtgccataagtatcattgctagtgttgcgcaaacattaatcaatgtattagtgtttggcatggatattcagcaggctatagatgaacctagaatttatagtagccatcctaatcgcattgaatgggagcctcaattttcacaatctacaatattagcattgattgcacatggacatgcaatggaacataaaccagatgcttatattggagatgtacatggactacaggttgacccaacaacgtatgaagcttcgggtggaagtgatgatactagagaaggcaccgtaatgggtggcgaggtgttagtgattagaaaacagccattaccatatcggcaaatgtatgatagtgacggctttcgtctatatttcaatgatgtgcagttacctttattggcagatcaagtgcgatggatgcatgacaaatattgggttgatgaaagtgttgttagaatcattttccctgaagttagtgcacatattgaagatttaagaagttatgaaaacgcaggagaaaattatatagatattgcctggttagcacggaaatatgcttatcaagtaacattgaaggatgacggtttatacttaactgatgatacatatacttcagtgaaacggaacacaaatgcatactatagatatgatcgagatagtatcacaagatagtttatacgcttgatatgaagtttgtagtggatatgagcttttgttgaatgaaaggattcgatttcgaactttagcgtgacgcttgagtgtagtaatgttggaaatgctatacgaaacgctagtcacctttgtaaaatatacaacgcctcacaaattcgtttttgatgtacatcacaatagttagcctaaaatctaatgtaatgtggtttggtacagttgaacgagttatgtgaggtgtttttataatataggattttaatagatgatttggatgtttctataattacagcataagtattaatgttcacttattttattataagtaaggctttctttataaatgatttggtcttttccaggacttgaaaaataaaaataaagtttctgatcttgatgattattgccttttaaatcactcattccctttaattccacctttgttgatgcgtttttaggaatattatatctacgttttaattgtttaacgtttggattatcgttcgacaacttaccagataaattataataatcagtggtaggatcatgtgtgactttcaaatcattgctatttaaaatgcttgttaaatcaccactttgaatcaaaaattgattgttttcgattttttgtttcagcgcgggatcttttacgtcttttgtgaaaacgattttattattaactacttttactggataacttttgtatgtcgagtcagtagcattttttttatcgtttgtagttgtgtcatattcaccagttattttatgtgtgttcttatctacctttaacaacatacggtcttcttttaaaagctcatctgatccaacaactgaataagaggattctatataccatgtgtcttgatcattattttcataatggggattatcgtgaccatcaatttcataaagcgtttctaagtttttaataggatacgtacttagtacttttttaagaccatctttcaaatgaatttgttcccacttcattgccaaaaacatatcgccactgactacaattgaaataataataattgctgctaagtttaaccagaaaattttatgtgctttcatacattcccaccgtttctcaaaatacttcattaacactataataatatattttgaaaaatatttacatcagtattaaagtgaatatcaaattttaaatttatgaaaataatagatatttataaaaagcggaaaagagatacaataaaaaactgcatgacgtttgagacgtcacacagtgtaactaaaaatttaaaaagttgttgctaatttttcagcattattaatactagttgctttaatttcttcagtcttatgaggttcagcattgtgtccttcaataatgattgtttcatatgatggcacacctaagaatgtcataattgttcttaaataacggtcacccatttcaaaatcagcagcaggtccttcagtataatatccaccacgtgattgaatgtgtaatacttttttgtcagttagtaaaccttgtggtccttcagcagaatatttaaaagttttacctgcaattgaaatagcatcaatatatgctttaactacaggtgggaaagaaaggttccacataggcgttacaaatacatatttatctgcacttaaaaattcttctaaaatgtcactcaatcttgaaactttcatttgttcatcatcagttaacgtttcgccattactcatttttccccaaccagttaatacatctttgtcaataactggaatataagtttcaaataaatcaatatgtttcacttcatcatcaggatgttgttgttgatatgtttcgataaatgctttaccagccgccatagaatttgataccagttcattaaaagggtgtgctgtaatatataatacttttgccatttgaaaattctcctctgtttctgttattttcttaagtataattattatactcgatataaaatttaatatcaatcaaaatattcaaattaccatcattttcttcatctatatttggcagtactactaaagtatgagtgcatttaattatgaaatagttgatttagaatatatacttaatacccaaaatatatgaaggatggatgccactatgacaaagcgaccaaaacgtattttggcaacaattatcatttttctttcactattatttacgattatttatatagatgacattcaaaaatggtttaaccaatataccgataaattgacacaaaatcataaaggacaaggacactcaaaatgggaagacttttttagagggagtcggattactgagacttttggtaaatatcaacattcaccatttgatggtaagcattatggcattgattttgcattgccaaaaggtacaccaattaaagcgccgacgaatggtaaagtaacacgtatctttaataatgaattgggcggcaaggtattacagattgccgaagacaatggagaatatcaccagtggtatctacacttagacaaatataatgtcaaagtaggtgatcgagtcaaagcaggtgatattattgcatattcaggcaatacaggtatacaaacgacaggcgcacatttacattttcaaagaatgaagggtggcgtaggtaatgcatatgcagaagatccaaaaccgtttatcgatcagttacctgatggggaacgtagcctatatgatttgtagttatagaagggtgcccgcagtctaaaaaattaagcaatcattgtgtgagtatgatacttacataatggttgcttttttcaatgaaaatcgtaatgctaagtcatacttgtttgatttagatattacttaaaatgtaagacaaggttgttagcattggcagtgaaatatcgcacataaaaaacattattgtcacactagaaaatagttgtgcactatatcaattttctgtataaaagtttaattctgacagtaatgtaaacgtttataatttatgattgacattaataatgactgaatatatgatttatgtaagtatttgtgcaaacgttttcacgaagtgtattgcacaatcaaactgtaaacaaagtatgggaggcataacatggcagaactaaagttagagcatattaaaaagacgtatgataacaacaatactgtagtgaaagattttaatctacatattactgacaaagaattcattgtatttgttggaccatcgggatgtggtaaatcaacaacattacgaatggttgctggactagagtctatcacatctggagatttttatattgatggggaacgcatgaacgatgttgaaccaaagaatagagatattgcgatggtatttcaaaactatgcattatatccacatatgactgtttttgaaaatatggcatttgggctaaagctacgtaaagtaaataaaaaagagattgaacaaaaagttaatgaagcagctgaaatattaggattaactgagtatcttggtcgtaaaccaaaagcgttatctggcggacagcgtcaacgtgttgctttgggcagagctattgttagggatgcgaaagtctttttaatggatgaaccattatcgaatcttgatgcgaagcttcgagtacaaatgcgcacagaaatattgaaattacataagcgacttaatactacgacaatttatgttacacatgatcaaactgaagcattgacgatggctagtcgaattgttgttttgaaagatggcgacattatgcaagtcggcacacctagagaaatatatgatgcccctaattgcatatttgtggcgcaatttatcggctcaccagcaatgaatatgttgaatgctacagttgaaatggacggattgaaggtaggaacacaccattttaaattacataataaaaaatttgaaaagttaaaagctgctggctacttagacaaggaaattattttaggtattcgagctgaagacattcatgaagaaccaatatttattcaaacttctccagagacacaatttgaatctgaagtagttgtatccgaactgttaggttcagaaattatggtacatagcacattccaaggaatggaattgatttctaaattagattcaagaactcaagtgatggcgaacgacaagattacactagcatttgatatgaataagtgtcacttttttgatgaaaaaacaggaaatcgtatcgtctaagggggagtattcatgtctaaaattttaaaatgtatcacgttagccgtggtaatgttattaatcgtaactgcatgtggccctaatcgttcgaaagaagatattgataaagcattgaataaagataattctaaagacaagcctaaccaacttacgatgtgggtggatggcgacaagcaaatggcgttttataaaaaaattacggatcaatatactaaaaaaactggcatcaaagtaaagcttgtaaatattggtcaaaatgatcaactagaaaatatttcgctagacgctcctgcaggaaaaggtccagatatctttttcttagcacatgataatactggaagtgcctatctacaaggcttagctgctgaaatcaaattatcaaaagatgagttgaaaggtttcaataagcaagcacttaaagcgatgaattatgacaataagcaactagcattgccagctatcgttgaaacaaccgcacttttttataataaaaaattagtgaaaaatgcaccgcaaacgttagaagaagttgaagctaatgctgccaaactaactgatagtaaaaagaaacaatacggtatgttatttgatgctaaaaatttctattttaattatccgtttttattcggcaatgatgattatattttcaagaaaaatggcagtgaatatgatattcatcagctaggactaaattcaaaacatgtcgtcaagaatgctgaacgattacaaaaatggtacgacaaagggtatcttcctaaggcagcaacacatgatgtcatgattggtctttttaaagaaggaaaagtaggacaatttgtcactggaccgtggaacattaatgaatatcaagaaacgtttggtaaagatttaggagtaacaacattacctacagatggtggcaaacctatgaaaccatttctaggtgtacgtggttggtatttatctgaatatagtaaacataagtattgggctaaagatttaatgctgtatatcactagtaaagatacattacaaaaatatacagatgaaatgagcgaaattactggacgtgttgacgtgaaatcatctaatccaaatttaaaagtgtttgaaaagcaagcacgtcatgctgaaccgatgcctaatattcctgaaatgcgacaagtttgggaaccgatgggcaatgcaagcatatttatttcaaatggtaagaatcctaaacaagcgttagatgaggcgacgaatgatataacgcaaaatattaagattcttcatccatcacaaaatgataagaaaggagattagttatgacgaaacgtaaccctaaattagcggcattattatctgttatacctggtttgggacagttttataataaaagacccattaaagggacgatattttttatctttttcatcagttttatttctgttttttatagctttttaaatattggtttttggggattgttcacattagggacagtacctaagttagacgattctcgtgtcttacttgcacaaggtattatttctatcttactcgttgctttcgcaatcatgctatatatcattaatattttagatgcatatcgtaatgctgaacgatttaatcgcaatgaggaaataaaggatccgaaggcgcgtatggtggcaacatgggacaagacgttcccatacttactaatctcaccaggtacattcttattgatatttgtagttgtatttccattaatatttatgtttggagtagcatttacaaattacaatttatacaacgcgcctccgagacacacattagaatgggttggtttagataactttaaaacgttattcacaattggcgtttggcgtaaaacatttttcagtgttattacttggacattagtatggacgcttgttgcaacgacacttcaaattgcattagggctgtttttggcaattattgtaaatcaccctgtcgtcaaaggtaagaaatttatccgtactgtgttaatcctaccttgggctgtaccatcatttgtgacaattttaatatttgtagcgttatttaatgatgaatttggtgcgataaataatgatattttgcaacctttattaggtgtagcaccagcatggttaagtgatccgttttgggcaaaagtggcattaatcggcattcaagtatggcttggattcccatttgtctttgcactgttcactggagtactgcaaagtatttcatcagattggtacgaagcagcagatatggatggtgcgtctagttggcaaaagtttagaaacatcacattcccgcatgtcatttacgccacagcgccattgttaattatgcaatatgcaggtaatttcaataattttaatcttatttatctatttaataaaggcggtccaccagtgtcagggcagaatgctggtagtacagatatcttgatatcttgggtgtataatctgacatttgagtttaacaacttcaacatgggtgcagttgtgtcattaattattggatttattgttgctattgtcgcatttattcaattcagacgtacaagtacgtttaaagatgagggaggtttataagatgacaaagaagaaaaacatattaaaagcaatcggtatttacagttttatagcgatgatgtttgtcatcattttatatccactactgtggacatttggcatttcccttaatccaggtacgaacttgtatggtgccaaaatgataccagacaatgcaacatttaaaaattatgcattcttactattcgatgacagtagtcaatacctgacttggtataaaaatacgcttatcgtagcatctgcaaatgcactgtttagtgtgatatttgtcacgttaacagcatatgctttttctagatatcgctttgttggtcgtaaatacgggctgattacatttttgattttacaaatgttccctgtattaatggcaatggtcgcaatctatattttgctaaatacaattggattattagattctttatttggactaacactggtatatattggtggatcaataccgatgaatgcctttttagtgaaaggttacttcgatacgattccaaaagaacttgatgaatctgccaaaattgatggtgcagggcatatgcgtattttcttacaaattatgcttccattagctaagccgattttagcagttgttgctttgttcaattttatggggccatttatggactttatattacctaaaatactattaagaagtcctgaaaaattcacattagcagttggattgttcaactttattaatgataagtatgcaaataatttcacagtgtttgcagcaggggcaattatgattgcagtacctatagcaatcgtattcttgttcttgcaacgctatttagtatcaggtttaacaacaggtgcgacaaaaggttagtttgaaattaggagtggggcagaattgataaagaaccactaatgacgataaagattaaaaggaggacgttatgatgacgattaaagttggaatcattgggtgtggtggtattgcgaatggcaagcacatgccaagtttacaaaaagttgaaaatgttgaaatgatcgcattttgtgacgtagacatttcgaaagcagcgagtgcggcagaagcatacggaactgacaatgcaaaggtttatgatgattacaaagcattgttaaaagatgacacgattgatgttatccatgtttgtacgccaaatgactcgcattgtgaaattactgtagcagggttgcatgctggtaaacatgtgatgtgtgaaaaaccaatggctaaaacgacagcagaagctcaaaaaatgatagatacagctaaatcaacaggtaaaaaattaacaataggttatcaaaatcgtttccgagcagatagtcaatttttacatcaagcagcgcaacgtggcgacttaggagacatttacttcggaaaggcacatgccattcgtcgtcgagcagtaccaacatggggtgtctttctagacgaagaagctcaaggtggaggaccattaatcgatatcggtacacacgctttagatttaacgttatggatgatggataattatgaaccagaatcagtgatgggttcaacattccataaattaaataaacagcatcatgcggcaaacgcttggggttcatggaatccagatgaatttacagttgaagattctgcgtttggatttattaaaatgaagaatggagcgacgatcattttagaatccgcttgggcgattaattctttagaagtggatgaggcaaaatgttcattatcaggaactaaagcaggtgctgatatgaaagatggtctacgtattcatggtgaagacatgggtacactttataccaaacacgttgaattggaaaacaaaggcgtcgacttttatgaaggtaatgaagtggatgaagctgaagaagaagcaaaagcttggattgatgcagttgtaaatgatactgaaccagttgtgaaaccggaacaagcaatggtagttacaaaaattcttgaagcgatttatcagtctgcaaaatcaggcaaagcaatttactttgaataacatcatacggtaaggaggcacatcatgacaaaattaaaagttggtgtgataggtgttggtggtattgcacaagaccgtcatattccagcattgctgaaactcaaagacacagtctcattagttgcagtacaagatattaatacagtgcagatgattgatgttgcgaagcgctttaatatacctcatgcagttgagacacctagcgagctgtttaaacttgttgatgcggtggtcatttgtacacctaataaattccatgctgatctttctatagaagcattgaaccatggtgtccatgtattgtgtgaaaagccaatggcgatgacgacggaagagtgtgatcgcatgattgaagcggctaataaaaatcacaaattattaactgtcgcatatcattatcgtcacacagatgtggcaattactgctaaaaaagcaattgaatcaggtgtggttggtaaacctttagtagcacgtgtacaagcgatgcgtaggcgtaaagtgcctggctggggtgtttttaccaataaagcgttgcaaggtggcggtagtttaatcgattatggttgccacttgttagacttatctttgtggctactaggtaaagatatggtgccgcatgaagtgctaggaaaaacatataatcaattgagcaaacaaccgaatcaaattaatgattggggaacatttgatcatactaaatttgatgtcgatgatcatgttactagttatatgacatttgccaatcgagcaagcatgcagtttgaatgttcgtggtctgcaaatatcaaagaagataaggttcacgttagtttatcaggagaagatggcggtatcaatttatttccatttgaaatatatgagccccgctttggaactatttttgaaagcaaagctaatgttgagcataacgaagacattgctggtgagagacaggcgcgtaactttgtcaatgcgtgtttagggatagaagagattgtggtgaaaccggaagaagcacgcaatgtaaatgcccttatagaagcgatttatcgtagcgatcttgataacaagagcatacaactttaatgattatcatatatgatacaaaattctcaatataaaaagaaggagtgcttttcaatgaaaataggtgtattttcagtattattttacgataaaaattttgaagatatgttagattatgtctcagaatctggattggatatgattgaagttggaacaggtggtaacccaggagataaattttgtaagttagatgagttgttagaaaatgaagacaagcgccaagcatttatgaagtcaatcacagacagaggcttacaaataagtggtttcagttgtcataacaatccaatttctccagatccgatagaagcgaaagaagccgatgaaacgttacgtaaaacaatccgtttagcaaatctattagacgtgccagttgttaatacattttctggcattgcaggatcagatgataccgctaaaaagcctaattggcctgttacaccttggccaacagcctactctgaaatttatgattatcagtggaatgaaaagttgataccatattggcaagatttagctgagtttgcaaaagagcaagatgtaaaaattgccatagagttgcatgcaggatttttagtgcatacaccatatacaatgttgaagttacgtgaggctacaaatgaatatatcggtgctaacttagatcctagtcatctatggtggcaaggtattgacccaattgctgcgattcgcatattaggccaagcaaatgcaattcatcacttccatgctaaagatacgtatattaatcaagaaaatgtaaatatgtatggtctaactgatatgcaaccatatggtaacgttgcgacaagagcatggacattccgtacagttggttatggacatagtccatatgtatgggcagatatcataagtcaacttattattaatggatatgattatgtattaagtattgaacatgaagatcctattatgtcagtagaagaaggtttccaaaaagcttgtcaaactttgaaatctgttaatatttacgacaagccagcagacatgtggtgggcataatacgaactcgaggttagtctgaagtttgtctgaagtaagactggtggcagtgttgaataaatgcatatgtcgccaagccattgccaaaaatttcacaccttaaatcaagtcattgtttgtaaagaaggtgtactttatataagtatatagcgatggtcatacccattcacagtaacaatcctcaccattgaaaagagtatataaccttttcaatagtgaggtatatgataataaaaaaaagcctgttgtcacaatggtcatagacacgacatactttaaaggtttctgaatataatatttcagaatgcactttaaagatggacgtcgatgtagactaaagtgatgacaggctttcatctttttaaatattcattaatttctcttcttgtttaatacgtacatataagaaatacgcatacggtactaataaaatagttgtatatgttgcgtgtgttaataataatacaccgattaattcaggaatgatgtttaagaagtaatttgggtgttttgtaattttatataatccagatttaataataggatggttaggtaaaatgaataattttaatgtccaaataccacctaaagttttaataaccataaataacatgatataagcaaagattaatataactaagccaataccatttgcaaagctaaatgtatctttattaataaatgcctctacaccagccaatacataaattaaaacgtgtgttattgctaaaaacttcgaatttttaacgccatattcaactgcaccgtctgcttttaattgttttgagtgattaatagatatctttaagctgacaagtctgatacagaaaaagataagtaatatagatagaatcatgatgtcctccgtcattatgtcatatgtataagcgttgattttgacaacataaagtattttatagataaagcttgtcaaatactattaactatttattaattttagtacataaatatgtttctaagtatgtgtttatgttcagtattttggataatttaataattttaaggatattaagcgcttacaccgacgtgatatatttggcttaacgaaaatgattgaggtgacagagatgaacttttttgatatccataagattccgaacaaaggcattccattatcggtacaacgtaaattatggcttagaaacttcatgcaagctttcttcgtagtgttctttgtttatatggctatgtatttaattcgaaacaactttaaggcggcacaaccgtttttaaaagaggaaattggattatctacattagaacttggttatatcggattagcatttagtatcacgtacggtttaggaaaaacattacttggatattttgtcgatggacgtaacacaaaacgtattatctcgttcttacttatcttatctgcgattacagttttaattatgggatttgttttaagttactttggttctgtaatgggattattaattgtactttggggacttaacggggtgttccaatcagttggtggacctgcaagttattcaacgatttcaagatgggcgccaagaacgaaacgtggccgatacttaggattctggaatacatcacataatatcggtggtgccatagcaggtggtgttgcactttggggtgctaatgtattcttccatggaaatgttatagggatgttcattttcccatcggtgattgcattacttattggtatcgcaacattatttatcggaaaagatgatccggaagaattaggatggaatcgtgctgaagaaatttgggaagagccggtcgataaagaaaatattgattctcaaggtatgacgaaatgggagatctttaaaaaatatatcctgggaaatcctgttatatggattctatgtgtttcaaacgtctttgtatacattgtacgaatcggtattgataactgggcaccgttatatgtgtcagagcatttacactttagtaaaggcgatgcagttaatacgatattctactttgaaattggtgcattagttgcaagtttattatggggctacgtatcagacttattaaaaggtcgtcgtgcaattgtagctattggctgtatgtttatgattacatttgttgtcttattctacacaaatgctacaagtgtcatgatggttaacatttcattgtttgcattaggtgcgttaatctttggtccgcaattattaattggtgtatcattgactggttttgttcctaaaaatgccatcagtgtagcaaacggaatgacaggttcattcgcgtatctattcggtgactcaatggcgaaagttggtttggcggctattgctgatccaacacgtaacggtttaaacatctttggatatacattaagtggatggacagatgttttcatcgtcttctatgttgcattattcctaggcatgattctattaggaatcgttgctttctatgaagaaaagaaaattagaagtttaaaaatttaatataaatcggattaaaagtatcgccaatctattgcaatatagttggcaatcctgccccgacggcatgtgcgtgaagagatgaaagatactgcttctacccttgcaaatatatcatctctatgtctcggggcagatcataattccctgttatgaagtatccttatttgcccgacttagggtgactcaatgaatttactccttacaataaagacatatagcggtgtcaatattgtagggagtattgttttatatttaaactctctaaaaagcggactgaaagaaaagtgaaaacttctctatcagtccgctttttcatagaacaaaatggaggcgccataatcattagttatgtgctaatctattttgcttgcttacaataatcacttggcgacatttgtaaatattttttaaaatgatagctaaacattttatactctgaaaagcctactttgtctgcaatttcatagtgtttgtaatgtcgatctaacaattgcagagattgtaaaatacgatagcgatttaaataatcgacaattgtaataccaacatgatctttaaatgttcgcatcgcatacgattcactaacatcgatatgttgaattaaatctgaaacagtcactttcgtttgataagattgcttaatttgatccacaatctggtttacataataatcatcgtattctacttttaatagtggttggaaggcatcatgacaagatgctaagctacggccgttctgtgattgttgctctaataaggtacggacaagtcttcctaaaataacttctaattgtgcatggtctactggttttaataaataatcaagaacatgatgttgaatgccggctttcatatattcaaagtcatcgtaactcgataatatgatgacattacaatctagatgcgcaatatcattgagtaaatcgacgccatttttacgtggcatacgaatatcagtaattactaattctggctgatgttgttgaattagtgataatgcttcaacaccatctttagcagtgtatattgtattgaaatgatagtctccccaaggaatgatttgctttaatccttctcgaataattcgttcatcatcacaaataactaccttaaacatctacattcccccttgaaagtggtattttataacaaattaacgtaccttgattacgctttgaaaaaatatggagtcgtgcatgtgaaccatattgaatcattgctttattgtgtaaatgatttaatcccaaatgcttagtatcaaatacatcattattaagagattggcgtacatattgcaggcgagatgacgacatcccgataccattgtcgcaaactaaaacatgtaaattctgacgtgccaatgtcaggcgtatagtaatgtccaatgactcagtatctctaccatgtttaatagcattttctatgagtggctgaagcatcattttaccaattgtctggtgacgcgcttcttcagaactttcaatatggagcttaatcatgtcatcaaaacggatgttttgtattgcaacatactgttcaatgtagttcaactcttcgtttaattccactgtatgtgagtttgtacgtaatgagtaacgtaacatttgcgataattgttggaccacagtttgtgctaatttcggagataacgtaattaaatattgtattgtttgcatcgtattgaataggaaatgaggctggaattggcgttctatttcctttaactgaatatcacgcaagcgacgttctgtatgctcgatagaatggatcagttgctcatttgattcaaataaatcgtaaatataattattaatttcttctagttcactgttgttttttaaaggcgtatatgtacctagatgacgatttttggcatagtaaattttttgaataatcgtttcgatatcttttgtttgtcgtttagccatattatctgcgctaatgaaaccaaatattactagtaaaacaagaactacggccataacaattaacaacgtgataccatcttcaatgttttcatgtatatctttataaataatgagacgatggtcagcatggtttaattttacagattcattcataaatccgaattgttgtggtctatacttttcacctatagtaaaacggtcatcgttggcgtataaaatattgtcatattgatcaacgataagtgcgaattgtcggttatctttcttaatttcacttaaacgtggggtgttagccatataaattttaagcatatatgtactatttttgaatttaagctgatgcgttgaaaataaatacatatttttagtgtttaaatgttcataattattggttataaactgatttggtccagataattcataataaagtgttgcgggctgttggtgtattaattttaataattcacgttttgtagcggtcacatcatgatgatttgttaaatcgagctcttgaaacgaattattatgctgtgtaataaatgtctgaatctgcttttcagtatgatgtaaagatgactgactttcatcaacatgttgatgaatcgtacgatgctcaatccaaatatagatggcatagaagcttactagtccaataataatgactaaaaatactggaaaaatagtagacgcaaataacgatcgtcttaattgatgtctataaggtttgtatgccgtcattgaatcatctccaaaaatttatgatgtggaatatccggtaatttagatttcggtattaaaggtatgttcttaagattttcgatagactgatcgctttgttcactaacatcctttcgaattgacttggcatcgaactctgcaactaatcgttgttgtactgagcggcttgttaaatattgcactaactttttacgcttaggatgagggtgtgcatttttaactaaagcaataccatcaacatttaacattgttccttcaattggataaacgattgatacaggataacctttgtttttccatgtgcgtgcatcttgttcgtagcttagacctgcgtaatatttaccttttgcaacatcttcaatgactttagacgtctttgacagttgcatcgcatggttttggaattgatgcacatcacttactcgatgatgcatgctataaatagcacgcatatgttgatagcctgtcgttgttgtatttggatttgagtacgcaattttacctttaagtataggttgtaataaatcttgataacctcgaatcttaatatctccttgtaaatctgaattcactactataactgttggcattaatagaaaactagtaacatatttattgttcgagcgataatcctctaattgctgtgttacagatgtatcttgatagggaacaaaatcttctggatgatcaattgtttctgacaacacaccacccataaagacatcaccacgctccgaaaaatcttcgttatgcaagtttgaaagcagtacttgagtagatccgtgtttaatttcaattttgacatgctcttgtttttcaaattcatttaaaattggacgaatcaagtttgattgatacggagaataaactgttaatacatttttatcggattcagagtgacgcgtattagcgcatgctgataaaaaaatgagaaataatagcaagatataaatttttgatttcatgatatcccatcaattctatgtatattttaatacaataattttagcaataaatgacgcataagtaatgttaaatatttagaaatgtttatagatgacttgttaagacgttgcaaatgttgtgatagcacaaaatttttgtttgtcaagacgatttaccgaggctgtaaaatcaaactgttatattttatttgtagctgttatataaaaatcggcaagatattgaacggttcaaaagtgaatttttacgtcaataaaagtatttaatccagtctcttcatatataaaagtaaatctttctaagtgttgatttaacgcttatcaacaatcattttttataaacaaatatatactcctaaattaacttttaaagcaatgaaaatagtgaacattataactgttgtgtaacagaatgcaattagcatattactgttacacaaattagtacagtttctatgttttgacatacatttgatgaaaattgtacataatttatgtgaaaaaaatcacaacaaacatgctacaatgactatgaaaacgttaacatagcatttcaaattcacaacattatacagatggaggcgtttagtatgttagaaacaaataaaaatcatgcaacagcttggcaaggatttaaaaatggaagatggaacagacacgtagatgtaagagagtttatccaattaaactacactctttatgaaggtaatgattcatttttagcaggaccaacagaagcaacttctaaactttgggaacaagtaatgcagttatcgaaagaagaacgtgaacgtggcggcatgtgggatatggacacgaaagtagcttcaacaatcacatctcatgatgctggttatttagacaaagatttagaaacaattgtaggtgtacaaactgaaaagccattcaaacgttcaatgcaaccattcggtggtattcgtatggcgaaagcagcttgtgaagcttacggttacgaattagacgaagaaactgaaaaaatctttacagattatcgtaaaacacataaccaaggtgtattcgatgcatattctagagaaatgttgaactgccgtaaagcaggtgtaatcactggtttacctgatgcatacggacgtggacgtattatcggtgactatcgtcgtgtagctttatatggtgtagatttcttaatggaagaaaaaatgcacgacttcaacacgatgtctacagaaatgtcagaagatgtaattcgtttacgtgaagaattatcagaacaatatcgtgcattaaaagaattaaaagaacttggacaaaaatatggtttcgatttaagccgtccagcagaaaacttcaaagaagcagttcaatggttatacttagcataccttgctgcaattaaagaacaaaacggtgcagcaatgagtttaggtcgtacatcaacattcttagatatctatgctgaacgtgaccttaaagcaggcgttattactgaaagcgaagttcaagaaattattgaccacttcatcatgaaattacgtattgttaaatttgctcgtacacctgattacaatgaattattctctggagacccaacttgggtaactgaatctatcggtggtgtaggtattgacggacgtccacttgttacgaaaaactcattccgtttcttacactcattagataacttaggtccagctccagaaccaaacttaacagtattatggtcagtacgtttacctgacaacttcaaaacatactgtgcaaaaatgagtattaaaacaagttctatccaatatgaaaatgatgacattatgcgtgaaagctatggcgatgactatggtatcgcatgttgtgtatcagcgatgacaattggtaaacaaatgcaattcttcggtgcacgtgcgaacttagctaaaacattactttacgctatcaatggtggtaaagatgaaaaatctggtgcacaagttggtccaaacttcgaaggtattaacagcgaagtattagaatatgacgaagtattcaagaaatttgatcaaatgatggattggctagcaggtgtttacattaactcattaaatgttattcactacatgcacgataaatacagctatgaacgtattgaaatggcattacatgatacagaaattgtacgtacaatggcaacaggtatcgctggtttatcagtagcagctgactcattatctgcaattaaatatgcacaagttaaaccaattcgtaacgaagaaggtcttgtagtagactttgaaatcgaaggcgacttccctaaatacggtaacaatgacgaccgtgtagatgatattgcagttgatttagtagaacgcttcatgactaaattacgtagtcataaaacatatcgtgattcagaacatacaatgagtgtattaacaattacttcaaacgttgtatacggtaagaaaactggtaacacaccagacggacgtaaagctggcgaaccatttgctccaggtgcaaacccaatgcatggccgtgaccaaaaaggtgcattatcttcattaagttctgtagctaagatcccttacgattgctgtaaagatggtatttcaaatacattcagtatcgtaccaaaatcattaggtaaagaaccagaagatcaaaaccgtaacttaactagtatgttagatggttacgcaatgcaatgtggtcaccacttaaatattaacgtatttaaccgtgaaacattaatagatgcaatggaacatccagaagaatatccacagttaacaatccgtgtatctggttacgctgttaacttcattaaattaacacgtgaacaacaattagatgtaatttctcgtacattccatgaaagtatgtaacaaaatttaaggtgggagcactatgcttaagggacacttacattctgtcgaaagtttaggtactgtcgatggaccgggattaagatatatattatttacacaaggatgcttacttagatgcttgtattgccacaatccagatacttggaaaattagtgagccatcaagagaagtcacagttgatgaaatggtgaatgaaatattaccatacaaaccatactttgatgcatcgggtggcggtgtaacagtcagtggtggcgaaccattgttacaaatgccattcttagaaaaattatttgcagaattaaaagaaaatggtgtgcacacttgcttagacacatcggctggatgtgctaatgatacaaaagcatttcaaaggcattttgaagaattacaaaaacatacagacttgatattattagatataaaacatattgataatgacaaacatattagattgacaggaaagcctaatacacacatccttaacttcgcgcgcaaactgtcagatatgaaacaacctgtatggattcgacatgtccttgtgcctggttattctgatgataaagacgatttaattaaactaggggaatttattaattctcttgataacgtcgaaaagtttgaaattctgccatatcatcagttaggtgttcataagtggaaaacattgggcattgcatatgaattagaagatgtcgaagcgcccgatgatgaagctgttaaagcagcctaccgttatgttaacttcaaagggaaaattcccgttgaattataaatacaattcagaccgaaaagaaagcatatgcaacttcaagagtgaaggggcatatgcttctttttcaattgagtattgagtattagcaagacgtagtaagtatatgagacaacttctacaatggttgaaggaagacgtttttgtaagtagctatgctgataaagaatgtgatgtcttgttaaaggtggggttccaatatcatcatttagctgatgttgaatgggttattatttgctacttgcatatgaatatgagtcttttcaaatttttattgaccctgagtaatgaaaaatattaagatgaaacttaatattaaagcaatgcggagcgtgattatgaagagaattagtaaagatatatgggcagtatttaaattactgtatcaaaataaagggcgttttagcattaatgccttactattgcagttaatcatgatttttattagtagtacatacttaattttactatttaatatgatgttaaaagtagctgggcaaagccaacttacgattaacaattggacggaaatcgttagtcatcccgccagtgtgatacttcttattatattcatattaagtgttgcctttctgatttatgtagagttttcattgttagtttatatggtttatgccggctttgatcgacagattattacatttaaatccatttttaaaaatgcctttgtaaatgtgcgtaaactcataggtgtaccagttattttctttgtcatttatttaatgttaatgatacccattgccaacctaggactaagttcagtattaacaaaaaatatttacatacctaaatttttaacggaagaacttatgaaaacgacgaaaggtataatcatttacggtacctttatgattgctgtatttatattaaattttaaattaatatttactctaccgttaacgattttaaaccgccagtcgttatttaaaaatatgagactaagttggcaaattacgaagcgaaataagtttcggcttgttatagaaatagttatattagaactcatcattggtgcgattttaacattaattatttcaggagcaacatatcttgctatttgtgtagatgaagaaggagataagtttttagtctcatcaattttatttgttgtattgaaaagcgcattgttcttctattatttatttacgaaattatcattaatcagtgtgttagtactgcacttaaaacaagagaatgtattagaccaaccgggcttagaatttaaatatccaaaaccgaaacggaagtctaggttctttataatttcaatggtgcttgcagtgacatgttttatcggttataacatgtacttactttacaataatactatcaatacaaatatctccattattggccatcgtggtttcgaagataaaggcgttgaaaattctattccgtcattgaaagctgctgcaaaagcgaatgtcgaatacgttgagttagatacaattatgacgaaagataaacaatttgttgttagtcatgataacaatttgaaacgtttaacaggtgttaataaaaatatttctgaatctaatttcaaagatatcgtcggtttgaaaatgcgtcaaaatggacatgaagcaaaatttgtatccttagacgaatttattgaaacggctaaacaatcaaatgtgaagctactagtagagttaaagccacatggtaaagaaccagcagattatacacaacgtgttattgatattttgaaaaagcatggtgttgaacatcaatatcgtgtgatgtctttggattatgatgtgatgactaagttgaaaaaagaagcgccatatctcaagtgtggttatatcattccgttgcagtttggtcattttaaagaaacatcattagatttctttgtcatcgaagatttttcttattcgccaagacttgttaatcaagcgcacttggaaaataaagaagtctatacttggactattaacggcgaagaagatttaacgaaatacttacaaaccaatgttgatggtattatcacagatgacccagcattagctgatcagattaaagaagaaaagaaagacgaaacatacttcgatcgttctataagaattttgtttgaataatataaacaaagacctctaaagttatcaagatgataccttcagaggtctttttaatgttgccatctatgggataggcaatcgtttcattcgtttatattcatatgacaagtatttgtatggcaatttggcgtcacaaacacttacatgatttattggtgaattattaattgttttgtgaatgcaaagggttagaaattgaattgtaaatactttctaatctttgtttcgctttagtcatttgatccaaatttttagtgcgtatagcggattttgcaatatagtgcgcagctaaaatatcgcgtttttgaaacgcatctaaatttaggtacgataatttatttaagtcagtgtttgctattaattcatgtaattgatctacaagcgcttgatgttgatacgtatgtgatgtagtttcagatttgcttgctaatttaataccagtcgtatcaaggagcgccgctttaataccagcaactaaatatgttttgattttcatttgtgttgtcatgctttgttactcctttgatgtacattaatcaaaaaaattatacactattgtatattgcaaagctaattaactataacaaaaagatagttaatgctttgtttattctagttaatatatagttaatgtcttttaatattttgtttctttaatgtagattgggcaattacattttggaggaattaaaaaattatgaaaaagcaaataatttcgctaggcgcattagcagttgcatctagcttatttacatgggataacaaagcagatgcgatagtaacaaaggattatagtgggaaatcacaagttaatgctgggagtaaaaatgggacattaatagatagcagatatttaaattcagctctatattatttggaagactatataatttatgctataggattaactaataaatatgaatatggagataatatttataaagaagctaaagataggttgttggaaaaggtattaagggaagatcaatatcttttggagagaaagaaatctcaatatgaagattataaacaatggtatgcaaattataaaaaagaaaatcctcgtacagatttaaaaatggctaattttcataaatataatttagaagaactttcgatgaaagaatacaatgaactacaggatgcattaaagagagcactggatgattttcacagagaagttaaagatattaaggataagaattcagacttgaaaacttttaatgcagcagaagaagataaagcaactaaggaagtatacgatctcgtatctgaaattgatacattagttgtatcatattatggtgataaggattatggggagcacgcgaaagagttacgagcaaaactggacttaatccttggagatacagacaatccacataaaattacaaatgaacgtattaaaaaagaaatgattgatgacttaaattcaattattgatgatttctttatggaaactaaacaaaatagaccgaaatctataacgaaatataatcctacaacacataactataaaacaaatagtgataataaacctaattttgataaattagttgaagaaacgaaaaaagcagttaaagaagcagatgattcttggaaaaagaaaactgtcaaaaaatacggagaaactgaaacaaaatcgccagtagtaaaagaagagaagaaagttgaagaacctcaagcacctaaagttgataaccaacaagaggttaaaactacggctggtaaagctgaagaaacaacacaaccagttgcacaaccattagttaaaattccacagggcacaattacaggtgaaattgtaaaaggtccggaatatccaacgatggaaaataaaacggtacaaggtgaaatcgttcaaggtcccgattttctaacaatggaacaaagcggcccatcattaagcaataattatacaaacccaccgttaacgaaccctattttagaaggtcttgaaggtagctcatctaaacttgaaataaaaccacaaggtactgaatcaacgttaaaaggtactcaaggagaatcaagtgatattgaagttaaacctcaagcaactgaaacaacagaagcttctcaatatggtccgagaccgcaatttaacaaaacacctaaatatgttaaatatagagatgctggtacaggtatccgtgaatacaacgatggaacatttggatatgaagcgagaccaagattcaataagccatcagaaacaaatgcatataacgtaacaacacatgcaaatggtcaagtatcatacggagctcgtccgacacaaaacaagccaagcaaaacaaacgcatataacgtaacaacacatggaaacggccaagtatcatatggcgctcgcccaacacaaaacaagccaagcaaaacaaatgcatacaacgtaacaacacatgcaaacggtcaagtgtcatacggagctcgcccgacatacaagaagccaagtaaaacaaatgcatacaatgtaacaacacatgcagatggtactgcgacatatgggcctagagtaacaaaataagtttgtaactctatccaaagacatacagtcaatacaaaacattacgtatctttacaacagtaatcatgcattctatgatgcttctaactgaattaaagcatcgaacaatcggaagcatatttctaaattatttattcattatagtcttaaacataacatgacctaatatattactaacctattaaaataaaccacgcacatctaagtgatatacgacaatcacagcaataataattgctttagaaagtcgtgccgaactggaacttacaagtctagttcgaacacacactgatgtgagtggttttctttattttaaacatgaacaatcagataagttactagcattagcaaatattattaaatcaaagggcttcgattcataaaatttaaaacaatgattaaaattagacgtgtaaatgttaaattctaaaacggaaataaccaccatcccattaaaccacttttttgttcaatcactatatttcacacagcttcattaataaaacgaaattgcttcaacccgcttcaacttcaactggcttcaacttcagcctacttcattcaataacaaaacgaatccgcttcatccaaaatcaaccattctaacgcacatattcaaatatagcagctgcacccatgccgacaccaatacacatcgtaaccatgccgtaacggctatcgggacgtctacccatttcattaagtaaacgcgcggttaacattgcgcctgtagcacctaatggatgacctaaagcaatagcgccaccattcacattcgtacgtgatatatctagacctacttctttaatagatgcaatcgtttgagaagcaaatgcttcgttcaattcgatcaaatcaatgtcttcaacagatagattgctgagtgacaatacttcaggaatcgcatatgcaggcccaatacccataattttcgggtcaacgcctactgccttaaaaccaacgaatcgtgcaataggtgtcacgccgagttctttcactttatctccagacattaaaactacaaatcctgcaccatcagaaagtggggcagatgttcctgcagtcacagtgccgtcagctttaaatactgtacgtaatttggctaatgcctccatcgtggtgtcagggcgtataaattcatcttggtcaaagatatttgtgtgtacttttggtcctgcgtttgtatattcaactgagtttacttgtattggaataatttcatctttgaaccgaccatcacgttgtgcgtcataggcacgttgatgacttctgacagcataagcatcttgatcttcacgtgatacgtcaaattgggatgctacattttcagcagttaaacccataggatatgacgcacctatatcatcatattgtaaggttggattgtttgtgggctcgttgccacccattggtacggcactcatcaattcaacgccaccagctacaagtatatctccttgaccagccataatttgattggctgcaatcgcgatggtttgtaatcctgatgagcagtagcgattcactgtttgacccggtaccgtgtcagataatcccgcacgcaatgcaatcgttcgtgcaatgttttggccttgtaatccttctggaaaagccgtaccaacaatgacatcttcaatcatattcttattgaattttccgtcaatacgtttcaatacgccttgtaatactttggctgcgacatcatcaggtctttcgtggaataatgcgccttgctttgctttcgctgcggctgaacgcccataagctacaatgtatgcttcttgcatggttatcatcctctcttaatgactatcttttaattacgtaatggcttaccagtttttaacatatgtgcaattctttcatatgattttttagattttagtaagtcaataaagccaattttctccaacgattgaatgtaacgttgattgataaatgtatttcttggtaaatcaccacccgctaaaattgtggcgatatttaaggcaatatgataatcatggtcgctaataaaatgaccccgtctttgcgcatctaattgtccttggatcaatgctttgaagtcttcacctaaagcgatatattgatgtctaggattcggaatatagtttgtttctgcttcatatttcgcacgtttgagcgcaacttcgacacgttgtgctgtattgaaaataatcgtatctgtatcacgtaaataaccataacgacgtgcctcaaaggcatttgtagagactttcgcaaatgcgatattcgtcagtacttttgtcatggaagcttgtttgtcatcaaacttatgcgatgtgcgtaatatgcgatcagccatttctgcaaggccaccgccactcggtaataagccaacacctgcttcaacaagaccgatatatgtttcacttgcagcgacaacaataggtgagtaaagtacaagctcacagccaccgcctaaggcacgaccttgaacagctgtgactactggtttcaaactatacttcaaacgattaaagctataatgtaatttatcaattgattgtgcaacgacatcatctacaagaccgtcttcatgcgcctttttcattaagaaaaggttagcacccacactgaaattgttaccatctgcataaataaccatacttgtgtaatggtcattttccagtaaatcaatcgcatcaactaacgcatcgttgaattcatcggtaatgacattatttttactttgtaatttcagtaacagttgatcatcatgagttacggaaagtttggcatcacctttatcccaaagttcatcttttacgaagtgagaaataggtgttgcatattcaatggtctcatcttgtttataaaagccaccatctaaatcactaatccattgtggtaagtctccaagttcgtcttccatacgtgttttaacacgttcgtatcccattgcatcccataattggaatggaccaagtttccagttgaacccccagacaagcgcacggtctatgtctcggaaatcatcggtagctttaggtacattgatagcagagtaatagaaattattacgtaatgtctcccataaaaatagtcccgcttcgtcttgcgcattgaatatggtatcaaggttatgcactaagtctttattaaattcatttaaaattggtaattgtggttgcgatacaggtacataatcttgtttttcaacatcgtaaacaagtcgagctttagtttctttatcctttttgtaaaatccttgtttcgttttacgtccgagtgcgccattgtcaaacaacgtatttacaattttgacatcatgaaaataaggtgtttcttcaggtacttgttgcatgcctttaattacagacactgcaatatctaaaccgactaggtcagatagcgcatatgtacctgttttaggacgaccaatcgcttgcccagttaaagcatccacatctacaatgcttatcttgtgttgctcggcgcgatacataatatcattcattgtttgcgtgccgactctatttgcgacaaagccaggcacatcattgacgacaatgacacctttacctaacacattttgcgcgaaattttttacatctaatataatagattccttcgtgtgtgacgtaggtattaactccactaatttcataatacgtggtgggttaaagaaatgtagaccaaagaatcgttcttgatccttctcgttaaatgcttgagcaatcgcattaattggaatacctgatgtatttgtagcgaataaagcatcttctttagcatgttgtagaacttgttgccaaacagcatgcttaatttcaatatcttctttgactgcttcgatatataaatcagcatcatcatttaccaagtcatcatcaaaattaccatatgttaaatgactcgctagatttaagtcgaatagtagcggccgtttcttatctgtaattttatcgtaagattttttcgcaatgagatttggatcgtttttgtccactacaatatctaatagttttactttaagtccagcattcacaaaaagtgctgccagttgagcgcccattgtgcctgcgccaagaacggttactttattaattgtcatagtgattcctccaatttagttgaggataagataaccattaagataattggaataacgttgctattttataaaattaattaagtatctttgacagtcatcttagcctcttatttaaggaaaaagctttatgcttaaaataagtcttttttagtgaaattaatgcatctcatataattatttgctatttatacgaaagcagaatctccagtcaaagcgcgtccaattactaaggcattaatttcatgtgtaccttcgtacgtgtaaatcgcttctgcatcagagaagaaacgtgcaatatcataatcgtcagctagtatgccattaccacctgtaataccgcggcccatagctactgtctcacgcaaacgtaaggcattcatcatcttcgccgttgaagttgcaacctcgtcatattcaccatgtgcttgcatattagctaattgagcacatgttgccattgcttgagctaaattaccttgcatcattgctagcttttcttgtattaactgatatttactaattggtttgccgaattgcttacgctcagtgacataatctaatgtggcacgtaaagcgccagccataccacctgtagccatataagcaacgcctgctctcgttgaataaagaattttggcaatatctttaaagcttgttatgttttgtaagcgatccgcttcatctactttgacattagttaatttaattagggcgttaggaacaatgcgaagtgcgattttattatcaatgacttcaatatcgacgccatcttgttctggtctgactacaaagcaatggggtttgccagtttctttatttactgcgaatactggaatgacatcagatacatgtgcaccaccaatccatttcttttcaccattgataacccaagtatcgccttggcgttcagcgactgtttcaagacctcccgcaacgtccgaaccgtgttctggttcagttaaagcaaagcatgtacgcagttcatgtgactgtaatttaggtacatatttcgcaatttgttctttgctacctccgaaatagaaagtgttatgccctaaaccttggtgaacaccgagtagggtagctaaggaaatatcaaatcgcgcgagtaggtaagacatgaaaaactgaaatagttgactaggcattttggcgtttggacgatccttgtaaagtaatggattgttaaaataatttaattctcccagatctttaaaatagtcctcgggtacagtagcgtctatccaatgttgattaatattttcacggtacttactttctagcaatgaatctacttgttgtaaaaattcgacttcaccgtctgttaaacctttagcaatactaagtacatcttcaggaaataatgtttttaagaccgtttctttttcaaatgtcatataaattcctcctaaaaataatatgaatactaatgtgaaatgcatttaattcaaaaacaacacgctttatttgtaaacgcttacactaaatgtcaaaaatttttatcacctttaaagtgtttgcgagactttgtcattcatcatttgtcgaatcgcaagtttatctggtttctgcgtactgtttaacggcatatgtgtcactggtacatacattcttgggactttataacctgctaaacgacttcgcatatgttgatttaaaatttcagcgtaatgaggttcatcttcgcgaagtataatggctgcagcaattgattcaccatattttggatgatcatagccaacgaccacacaccggtctactagtggatgctcagctaaagcattttcgacttcggatggtaagacattttcgccaccagttatgattaattcttttttgcggtcaataataaatatatcgccatcgttgtccatcttcgctaagtcaccagttaataaatatcgaccatgaaatgctttggcagtctctgctggtttattccaatatcctggcgtgacatttttagccttaattgcaagttcgccaatctcaccagtaggtacttcctcaccgttatcatcaaggatacgtgcatcaacgaacatgactgctttaccaatactcattggcttacgttttgaattttccggtgtattaacaagtacaagaggtgcttcagttaaaccatagccgttaataatgtttatgccatattgtttaaaagctgcttggatacttggtaatggttgtgaaccaccttggatgatataatccatagctctaaaattttcaggattaaaattactagcacgtagcgtactataatacattgtcggaatcatgataataaatgtagggtgatattgtgcaatcatgtcattcaattcttcgccgttaaagtaacgttgaagaataagtgtgccacctgacattaatactggtaatacagtatcgttaaaccctaaaacatggaacattggtgttgatacaatcgtaatatagtttgaattgaacttatacgtcagctctaagtttgcaccgttatgaacaaatgattcatatgagaacatcacacctttaggtgatccggttgtaccacttgtataaattaatgctgcaagatcttgtggttcaacaggtgttgcttgaaaaggttggtgataatctggatttacgatttcatcatattgcgccacatcaatatccatatgcaataagttttggtcaatatcggtgagtgaacttaaatgtttttcagcatagaagagcagttttaattgtgcatcttccacaatggctgcaatttcttttgggttaagccgccaattcaatggtaaaaaaaccgcacctgttttaaaacaagcaaacaataaatctaatattgcaatatcatttggcgcaaaaataccgataacatcgccttttttaacaccttgagatgttaaataatgtgccatattatcagcgcgtgcattgagttgttggtatgtccaagatgtttgttttgcgtgatcaataacggcaggcttgtcatcatcgaagtctgaacgcgtttttatccaatcgaaattcattagtataccccctttagcttcactttcatactttatgaattgattgtttaagttgtccccatttttctttgtaaatgctggtatcaattaattttaaatgatcagcaataattggtttaaaagccatttgattcaaaatatctttatgcaaatcaagacctggtgcaatttcaattagtttcaagccttgattggtgagttcgaatactgcacgatcagtaacaaaatagatttcttgctcgagtgattgtgaatattgtgcattaaagtcgatatggctcacatctgatacaaatttctggttttgtccttcagtttcaatgtttaatcgttgattatggcatgagacatgactgccagctacaaaagtacctgaaaagataattttatttacagattgcgtaatgtctataaagccaccacatccatttagtcggtcattgaagtaagacacgttgacattgccgtattgatcaacctcagcaaagctaagataggcaactgatacaccattgttataaataaaatcccatgctcgatcatgaggcatgcgcacatctgcattgtaattcataccaaaatgttcacgactcccaacgaatccaccgaaaatgccaacatctaaaatcggttgcacatcatgttcaacacattcttcatgcaataaattagagagttcattattgatgccataaccgatgctaattgtatcgccataagttaaaaactgagcagcacgtcggagaatcaatttgcgactattaaaaggtaatgcgggttcaggtattccatcaattcgttcttctccagacaaggctggtaaataatgactttgaattacttggcggtgattcttttcatcttctgtgacgtatacataatcgacaagatttcctgggataacaacttcattcggttttagttgatagtcgtcaactaaagctttaacttgtacaataactttcccatgattggctttcgcgtttaatgcgacatgataacactcgctcaagtacgcttcttgagttaaataaatgttaccttgttgatctgcgtatgttcctctcagtagtgccacatcaacgctagggaatgtgtaatgtaagtatgtttcatcgttgatggttactaatgaaactaaatcatccgttgttcgtgtatttactttaccgccaccgtatctaggatcaacagctgtgtttaatccgattttagtaataactccaggtaataattgattactctgacgataatgagttgcaatgataccttgtggtaaaaaataagcttcaatgtcattatttttcattgcttgtgccgttttggaagaagccgttaaaatactcataatgacacgtttaatcatgcgacgttctataaaatcatctaaatccggtgcggcacctaaactatgaatatcattcgctaatataaacgttaaatcattgggcgtatgatatgtgtcatgttgcgctaacacagcacgtagaacttcggcgggtaagttggctacagctaatgctggtaaaccaatcacatcaccatctttaatgatatgttgtaagtcgtgccatgtgatttgtttcaagcaagtcacctccatcacatttgataaaatatagcgtttttacactttgtgtaaacccttacaagaaatataacataacgacgtttaaaatcaattagaaatatctttttattctgataatagacacagtatagacacattttgacggtcgataacaattgtaatatcaagggtttgtaatgaattgaatatcattaaaatacttatataaaaatattgttcggaatataaaaagttaaataggttttgatttttaaatatgaaatacaaagtgcccaatcgaacaaagtatttatattaaaatatggaaaatccatcaatattaaattaaaatagttttattatgaaaagtgaaagtaggtaagtctatggaaggtcttaatcatcgaagaaatacagaaaaagaagagacaacacaaacgcaatcagttgcacctaatacaggtgaagaggggatgtcatcagcaagtacacaatcaactaagacgtccgacatacataatgaatctatcgataaacaaatggaagctaaagcgcatgaaacagcgcaaaatacagatttaaaaaacgaagcaagaagtttatttgataatgcaaccaaatcaatcggtagactagcgggcaatgatgaaagcttaaatcttaatttaaaagatatgctttctgaagtatttaagccgcatactaaaaacgaagcagatgaaatatttatagcgggtactgctaaaactacgccagcaatttgtgacatatcagaagaatgggggaagccatggctcttttctcgagtattcatcgctttcacagtaacatttattggattatgggtcatggcagcaatttttaataacactaacgcgattccgggtctcatttttataggggctttaacagtaccattatcgggtttgttcttcttttatgaatcaaatgcgtttaaaaatattagcatttttgaagttattatcatgttctttattggcggcgtattttcattactaagtacgatggtattatatagatttgtcgtttttagtgatcaattcgaaaggtttggttctttaacatttttcgatgcatttttagtaggattagttgaagaaactggaaaagcactcattattgtttatttcgtcaataaattgaaaacaaataagattttgaatggattattaatcggtgctgctattggtgcagggttcgcagtttttgaatcagcaggttatattttgaatttcgctttaggagaaaatgtcccattattagatattgtcttcacacgtgcgtggactgcgattggtggtcatttagtttggtcagcgattgttggtgctgcaatagttattgcgaaagaacagcatggctttgaattcaaagatatttttgataaacgctttttaatattctttttatcagccgttgttttacatggcatttgggatacatctttaactgtacttggcagtgatacgttgaaaatatttattttaatcgttattgtgtggatacttgtattcattttaatgggggcaggtttaaaacaagtgaatttactgcagaaagaatttaaagaacaacagaaaaaagtagacgaataataattaaagcttatgttgctcatatgtttgtgacataagctatttttataatttgtctttaaaagagtggaataggaatactttttggagttaaaaaagtgtttcacgttaaacaaatagtgacaattagatttatataaaatgaacatgattcactgaaagtatgtaataatcattttattgaaattcatcaaacagaaattaatacaatcatataagcaaattaaaccacgccataatcatattggatgacttcggcgtggtttttatagttgaagcagggctgagacataaatcaatgtcccacactcccttatcgttcaatcgttgttcgataatcgattaaatagataccttcaggtgttactttataatttttaaccttagagttagcagcgactatttgatcgttgtaagcaatataactgtttggtacatctcgacttgataatttaataatatcattagaaatattgtgacgttccttaacatctacagtatgattcaattgattaattaaatcatcgacgttgctattattgtagtctcctttattaatagcaccatcttttttatatgcttgattaaagaaataacctgtatctccacgaggaattgttccgaaactatacatcgttgcatcccatgcagaacggtcttttaagtaaccttctatgtcatcaacacttttaatgtcgatttcaatatttgcttttttagcatctgattgtaatacttgcgcaattttcgatagctctggacgaccgtcatacgtaattaacttaatttttaaagggtgttcttttgtataaccatctttagctaataacatttttgcttgttcgatattttgtttggttaacttaggttctttaatatatggaattttatcattaaatggactcgttgcaggtttcgcataaccttgataaatatgatctgcaataccttgtctatcaatgatatgatctaatgcttcacgaacggatttagtcatttttttattagtatgattatacataagtaaagaagttctaaatccagattcttttgacacttttaaattttgattattttctatgtcttgaactttattaactgggacatcagttattaaatcatctttttgagattctaaatttctgacgcgattattgccgtcttcttggtacgtcacagtaatatgatcaagtttcggtttaccttgccaatagtccttaaaattcgacaatgatatttttcgagattgcttataatcttttatttggtaagggcctgtaccaacaggagtttgattaacatctgatttagcatctgtatcataaattgccataaaaggattagctaattcagatacaagttcagggtaagcggagttggttttaattgtcagtttttgacctttagcggtaattgatgatattggtaatgaatatttgaccaagtcgctttttttcatgctattttcaaggctagatttcactttttctgcagtcaatttttgaccgttttgaaatttaatattatcttttaattctatatctaacgttgtatcatttggttgatgatacgatttcactaatgctttttctatttttccttgatcatttgttttaaataatgattctgcagcaccaatcttaactggtacatctgtttcataaggtgcaatagactttgtttttaacggtaacgaaatatttaagtctttgccagatgaatgcattgagccacatcctgataacactaatactgctgaaaatatagttgctagtcttttaaacttcatttcattaacactctctttctaattactatgtaaaacccaacaattaatattttaaaactttattttgttaaagtaaaatgttgttcaagtttagtaattattaaagttcaattaattgtagtaattatgctttttaaaaataaatattagaaatgaagttagcgacatttatagtgattcacgataaacatatataactaagtattgagcaactgctgtagtactacagcttggttatgtttagtatcttttgctgcatataacaatagaacatgattatgctgatttacaatatcctttaatttttcaaaagcatctttttgcgcatcctgatcacgtaattctttttcatatttttctttaaaagctccaaaaagtttaggatcatgttggaaccattgtcgcaactcagtagaaggggcaatgtcttttaaccaataatctaggttagcagttcttttcgaaatacctctcggccagactctatcgactaggatacgaatagcgtcggtattatctttattgtcataaatccgtccaatatctacggtcatcttgtgaactcctttcttatgaaattcagtgagcatacatcaatgcatgttgtggtgggacgaccaaataaattttgcgaaaatatcatctctgtcctactcccaattaaaaaacagccatgacaaagtaaagtcatagctgttttggtatagatgtcatttatttttacgtttagttaaatacttcaaaccaactgcaaagaccgtgtacccggctatggtttgtatcaatgttttaattaaattattatttttaacaataatatttgcagtaacaatacttacgaaatataatgcaaatacttttacgtaacgttgattaagtttcatatgagcactaaacctcttttctcagttatactgcaacgcttagtcttggaataaatgtttcgtagtgtacgcgatccatatcgtaatttaaagatttaagtgcttcgatcatagattgtaagaattttgtaccaccacagatataaatttcaggtttatttgctaaaaatacttgtaattcttcagcaccaatatagccttgtttatcttttaagtgtgtatataatttagcgttgtcatgatggcttgcgatactgttgaagttgtctttgaaaggtaaatgttgttcattttcagcaacttgaaccatctgtgtatctaaacctttggcagaggcagcttcatacatagctactaaaggtgtaacaccaatacctgaacctaagaaaagttgtggttcagtcgtattctctaatacgaatccacctacaggcgcagctaaattaatcatatcgccttctttaatctcatcgtgtaaaattgttgaaacttcgccttcatgttctgttgtgacatcacgtttaacgccaaaagttaaatggtttttttcacctgatacgatagaatagtgacgtttagctctatatggaagtttatcactagaaacatcaactgtgatgtattggcctggtgtaaattcactaaagtcatattcttcagtttcaactgtaaatgatttaatgtcttcagattcttgtttaatattggtaattttgaatggtttaaaaccaatccacatcatttgatcataaatttctttttcaatttggatgaacacatccgcaataacgccatatgcttttgcccaagcttgaatgacagggtcattttcttctaatcctgtcacgtcttgaatggcttttaataaatttttccccacaattggataatgttcagcataaacttgtagtgcgcagtgtttatatgcgactggcataatgactggtttaataacacttaagttatcgatattaaccgctgcggccattacagcttgtgctaatgctgaagattgcatgcctcgtttttggttcgtttgattaaacatgtttaaaagttcaggatgcgctttaaacatttttggataaaagattgacgtaatttctgtccctttctctttaagtaaaggcaccgtttgtttgataatgtctttctcttgttctgtaagcatgatactcctcctttaatctgtatattttgattattctactaaaaatttcgatattcaattaattggtttgagaaaatataaataaaatggcaaatttgataattgtatgacatttttaattttttaaatacttatcaataagcattgtgtacaattgtctgtttgcacaccgacgattgagcgcatttatttgactaattcaaaaaacattgttgttttcctagaaaaaagtaaacatgataataaaaatgtgaaagtgtaaataatcactggcgaagtacgaagactaaagacatctaagatgtaatcgtatacaaattaaaaaggtgtaaaaattaaaataaaatgtgaaataaatcacaatttaatattgacccagtacttaatgcatgttacattttatatgtgaaataaatcacaaacttaaaagcggatgacacatgaccttttaagttatgcgttgaaaataaaagagatgtttatttgcttttgtatcgtcaataagcagcattaaactaacatatttgaagctacatgtatgttagtgaattaatcataagggagtttttgtaatgaacaaatttaaagggaacaaagttgtattaataggtaatggtgcagtaggttcaagctacgcattttcattagtgaaccaaagcattgttgatgaattagtcatcattgatttagacactgaaaaagttcgaggagatgttatggatttaaaacatgccacaccatattctccaacaacagttcgtgtgaaagctggcgaatacagtgattgtcatgatgcggatctagttgtcatctgtgctggtgctgcacaaaaacctggagaaacacgtttagatttagtatctaaaaacttgaaaatattcaaatcaattgttggtgaagtaatggcatcaaaatttgatggtattttcttggtagctacaaatcctgttgatattttagcgtatgcaacatggaaattctctggtttacctaaagaacgtgttataggttctggtacaattttagactctgcacgctttagattattgttaagcgaagcgttcgatgttgcgccacgtagcgtcgatgctcaaattattggtgaacatggtgacactgaattaccagtatggtcacacgctaatattgcgggtcaacctttgaagacattacttgaacaacgtcctgagggcaaagcgcaaattgaacaaatttttgttcaaacacgtgatgcagcatatgacattattcaagctaaaggtgccacttattatggtgttgcaatgggattagctagaattactgaagcgattttcagaaatgaagatgccgtattgactgtatcagcattattagaaggcgaatatgaggaagaagatgtttatattggtgttccagcagtcatcaatagaaacggtattcgcaacgtcgtagaaatcccattaaacgacgaagaacaaagcaagttcgcacattcagctaaaacattaaaagatattatggctgaagcagaagaacttaaataactttttataaaatctataccatcccaaaaattgtaaaaccttacccaaaaaattgtataaagggctatttgatacaactatatgtgtcgagtagccctatttttaatgtagtgaaagtcgttgttgaaattaaattcaaatctggcacttaagctttaatcatagcattaagatgattgtctagcagaggcgatttgcgggctcactacagtgcatgatgaacttaatgcttcaaatgtaacattaaaaataaaagcaacgatgtcacttcttacttcgtacatcgttgccattagttctgttgatatttcggttagtcttaatccccgagcaattcttcaatttcatttttgataactgtaacgtgaggcccataaattacttgcacaccagtgccttgctggattacacctttggcaccagtactttcgagtaatactttatcgactttgtcattttgatgaagtgtgacgcgtagtctcgttgcacaacagtcaacgatttcaatgttatctttgcctcccaaaccagcaacaatagtttgtgctctttcagtagcctcaacttgttgtgctgcagctttatcttctcgaccaggtgttttgaaattaaatttcgtaattaagaatctgaaaacgatgtaatacaaacagaaccacacaattccaataggtatgacgtataggtagtttgttttactattaccttgtagcacaccaaagagtaagaaatcgataaagcctccactgaaggtttgaccaattgtaatgttgaaaatgtctgccatcataaatgctaatccatcaaagaaggcatggattacataaagaataggtgcgacaaacaagaaactaaactctaaaggttcggtaatacctgttaaaaatgaagtgagtgcagcggataacattaaaccgccgacaacttttttatgttcaggtttagctgtgtgataaattgcaagtgcggcaccacataagccgaacatcatcgtaataaaacggcctgacataaagcgtgacacacctgaataatacttcgtcacatctggatcaccaagttgagcaaagaagatgttctgcgtaccttgaactaagtgccctttgacttctaaagtaccaccaagtgccgtctgccaaaacggtaagtaaaaaatatggtgtaaaccgagtggacctaacaatcttaagatgaagccataaacaaaagtaccgatggcacctgttttcgttacaaatccaccaacatgataaatgccggcttgtatgcttggccaaatgaaaaacatcaatacacctaaaaagattgcggcaaatgctgtgacaatagggacaaatctagagccaccaaagaaacctaaatacggtggtaataccactttgtgatatttgttgtgaagtattgcggtcataatacctgtgataatcccgccaaaaacaccggtttcaaccgtttgtataccgagcaccatgccttgtccattttgtgcaagctgatcttttgccaatgtgcccgtgatagttaataagccattcatagttgcgttcataattaagaaaccgagcagcgcagctaaacctgcagtacctttatcgcttctagataatccgattgcgacaccaattgcaaagatgaccggtaaattttggaaaacaatactacctgcagctgacattaatgtaaaaatattttgtaataaggtaatatctaaaatagggtatgctttaacggtgtttggattacttaatgcaccaccgatacccaacaatagacctgcagctggtaagattgcgataggtaacataaaggacttgccgaactgctgtgctttttcaaataaagatttcatcaacatccctcctaattattctcaatatagcttttgagaaatttaatatcaatatatattctgtgtatgaaaatatttttcataaaaattgtttgaatcatgtaacaatcatataaattgctgtttatattgttgtgaaaatgagttgacaaaagtcggtatagatatgtagacatcctatttttagcgaggtaggttgataaggcatatcggataaatttataagccataaaatagataaatagtgtttgtatccaaaaatatgagaaagttaaaactatttttcaaaataaacatgattcaccacataaataaatatacataagctatcgataacaacttaagaaaggtggatatataaatgaaaagaaagattattatggattgtgatccaggacacgatgatgcaatagcattaattttagcgggggcaattgacagtccactagagatattagctgtaacaacagtcgcaggtaatcaatcagttgacaagaatacgacaaacgccttgaacgtattggatattatgggacgccaagatatagcagtagcgaaaggtgcggataggccgttaattaaaccagctgcctttgcttctgaaatacatggggaatctggattagatggtccgaaactaccgtcgacaccatcacgtcaagcagttgcaatgccagcatcagatgtgattataaacaaagtgatgacgagtgatacacctgtaacaattgtagcgacaggtcctcttacgaatgtagcaacggcattgattcgtgagccaagaatcgctgagcatattgaatctattactttgatgggtggtggtacatttggaaattggacgcctacagcagaattcaatatttgggtagatgctgaagcagcgaagcgtgtttttgaaagtgggattactataaatgtgtttggtttagatgtaacacatcaagttttagccgacgatcacgtgattgaacgctttgaaagtatcaataatcctgttgcacagttcgtcgtagaattattgcaattctttaagaagacatacaagactcactttaatatggatggtggtccaatacatgatgcttgtacaattttgtatttgttacaaccagaattgtttacaatggtacccgttaatatcgacattgaacatcaaagtccactaacttatggcactatggctgtcgatttaaatcatgttacaggtaagcctgccaatgcttattttgctacagcagttgatgttgaagaagtgtggaacttgatagaccataagttacgtacatacgaataataatacttaattaaatagatacagttaaccctaaggcgcctgatataagcgtccttagggtttttgtattgggttacaatggtcatgacaatttgataatgattgagatatgtatgttaaaaatgcttcaaaaaaacacaaaacacaaaaatatatgcaaaaatttcaattgctttattttaaaagattaaaatcacaaaaaatatagatataattgaaatgttgttaaaacatcacaatgatgtacatgctcattttgaaaatatgtgttcaaagtgtgtacatcggtgtgacgattgatgataaattgagctcagatgctcaaaggagaatcgaacatgaacggggataatcagcaaatactcagagaaattgtattgaatcctactattcatggtaaagaacttgaatcgatatttggtttgtctcgtagacaactaggatatcgcattcaaaaaatcaatttgtggcttgaacaagagggttatccaaaacttgaaagaacaagccaaggaaattttattgtaagttctgaaatcatgacgttattcaagcgagatgtatcggagcagcaaatgttaaacggcaacaatgtcatttttagcatagaaacacgtcgttattatttaatgctcatgctttttagtaaggaaaacgcaatgtctctaaaccatttttcaattgatttacaagtcagtaaaaatactgtcattcacgatataaatcatgtgaaagagcaattggaaaatcatggtttgtcacttaagtattctcgaaaacatggttatgaaattgttggtgatgaatttgaagttcgccgtttcttcattaagttgattgatcaaaggttgaatcatgatattactaaaagtgaagttttaaaggcgctcaacttaacattcgaagatatcgcatatcaaaaagacaagatcaaacaggtagaacaatttttgaagagtcgctttatagacaaatcacttagttcattgccttatgtcctttgtgtgattcgtagacgaattcaaagtggtcatgtgatgaatccattaaatattaattatcagtatttgagggatacgaaagaatatcaagcaacggagattatgacgcaacatgagccggatttgccagaagcggaaaagttatatttgacattacacttactttcaacaagtgtgcaatggactgatttgcaagaatcagatagcatatcgaatttaacgatggccatcgctcaaatgattcaccattttgaacaaatcacttttattaacattgaagataaggagaaattatcacagcaactcttgttacatttaacgcctgctttttataggattaaatataacttaacggatcgtgatgaattaataaatcctttacaaggaaattatcaatccttatttcatatggtgaaacaatcatgtcaatcgttaactgaatatttcggaaaatcgttgcctgataatgaaatagcatatttaaccatgttgttcggaggtagtttgagacgtcaagatgaaaacttcgatggcaagataaaagctattatcgtgtgtacacaaggcacgtcagtatcacaaatgatgttatacgagttgcgaaacttatttccagaaattattttcttagatgcgatttcacttagaacatttgaaaattacacattagattatgacatcgtcttttcaccaatgtttgtcctaacacataaaaaattatttatcacaaaagtagctttatctgaaaatgagcaacgaaagttacgtaaagaagtgatgaagtacattaataaggaatcggctgacattgataaggaaataaacaagttaatggcattaattgaacgcacaacgacagttaatgacattacagaactacgtgatggtttagaagattttattgccaattataattcaatttcaaccattaatggatcgattgtcacacaaaataagacattagatttagctgacttgataccggcaaggcacgtgaaaagaatgcatcatgttgaaaatattgatgaagctattgctaaagcaagtgatgtgttagttgctaatcattttattgatattaaatatattcatgagatgcaacaggtatttgatgattcgtatatggttatcatgcaaaatattgctattccacatgcatactctgaaaagcatgtacataaaacagcgatgagtatgttgatattacaagaaccaatatacatgtcagatggcacagcaatccatattattgtacctattgctgctgttgataaagtgacacacttaagagcgttactacaattgagagatgtggcgcaagacaatgacgcaattaagcgcatcatacaaagtcgcaaaaattctgatgtaaatgagattttaaaaaattattcaaataaagaagcgagggaaaatggatgggacagcaattagtgcataaagaaaatataatgctcaatttgtcggcaactgataaagaatccgtattgtcacaaatgtcagatgtgttatttcaaaatgggttcgtgaagtcaacgtttaaagatgcagtcatcgacagagaaaaagaatttgctactggtttaccaacgcatctatgttcggtcgctataccgcatacagatgtcgaacatattaaccatagaacgataggtgtggctgttctagaaaaagaagtgccgtttattgaaatgggaacacttgatcaacagacagaagtgaaaatcgtttttatgttagcaatggataaagtagatgatcaacttaagctgttacaacagttgatgcaaatttttcaaagtgaagaaaaattggagcagattctacgaacgaaagatgaaacaattttagcaacactaatcaatgattatttggaatataactaaaaattaattggaggaattgaaaatgaaacaagtattagtagcgtgtggtgcaggtattgcaacgtcaacagtagtaaataatgcaattgaagaaatggcaaaggaacacaatattaaagtagatattaaacaaatcaaaattacagaagttggaccttatgaagacactgcagatttattagttacaactgcaatgacaaaaaaagaatataaattcccagttatcaacgcacgtaatttcttaactggtattggtattgaagaaacaaaacaacaaatcttaacagagttacaaaaataacggaattgatatgtaacgtgggtcgataacatattaatatatgcaaattgcatataaatgactatcacgacaaatgattgttgatgacatagaaacgcagtgactgtaattcaaaaggactgcagtcgaatttagcaagggttgtcgttgaaatgactgtaacgtcaaatgtaatcacaatcggaaagtatcgtgacaatgcatatataacagggagggtttaaatatgagttacttcactgattttgtaaggggatttttagatttaggtgcaactgttattttaccggttgtcatattcttgcttggcctattctttaggcagaaaattggagcggcatttaggtctggtttaacaataggtgtggcttttgtagggattttcttagtcatcgatttattagttaaaaatttagggccagcagcacaagcgatggttaaaaatttaggcgtcagtctgaatgtgattgatgtaggttggccagcaacatcatctatcgcttgggcatcatctgtcgcagcatttattattccactcggaatcatagttaacgttgtattgctagtaactaaagtgacaaagacgatgaatgtagatatttggaatttttggcattatacgtttacagcagcaatggtttatgccgtatcaggcagtatttggcaagcgttattagcagcagttattttccaaattatctgtttgaaagtagcagattggacagcaccgatgatgagtgagttctttgatttaccaggtgtatcgattgctacaggaagtacaatttcttatgcaccaggtatttacttagttaaattgttacaaaaagtacccggtctgaataagttagatgctgatcctgaaacaattcaaaaacgttttggcgcatttggagagtctatatttgtcggcttgattttaggtttaggtattggtgtgttagcaggttacaaacctggagacatcattaatttaggaatgtcaatggctgcagtaatggtattaatgcctagaatggtaaaaatcttaatggaaggtttaatgccagtttcagagtctgcaagaacatggctaaataaacgttttggcgaacgtgaaatttatattggattggatgcggctgtagcattaggtcatccagcagttatttcgacagcattaattttagtacctatcactgttttattagccgttattttaccaggaaaccaagtactaccttttggtgacttagcaacgataccatttgttgtcgcgtttattgttggtgcagcaagaggaaacattattcattctgtcattgtgggtacgattatgattgcaatttcactatatattgcaacagacgtagcacccattttcacagatatggcgaaaggtacgaatgtacaaatgccaaaaggttcatctgaaatttcaagtattgatcaaggtggtaatatcgttaactatcttatctttaaactatttagtctattcaattaaaaatcgaggtgtttgtggtgaaagctttagtaaaaacaagagaaggacatggcaacttagaacttcttgataaagaagttgcaacaccgctagatgataaagtaaagattaaagtacattatgcaggaatttgtggcacagatattcatacttatgaaggtcattataaagttaattttccagtgacattaggtcatgaattttctggtgaaatcgttgaagttggagcagacgttaaagattttaaagttggtgaccgtgtcacatctgaaacgacattctatgtttgtaatgagtgtgaatactgtaaatcaaaagactataatttatgcaaccatcgaaaaggtattggaacacaagttgatggcgcatttactaattatgtcattgcacgtgaagaaagtttgcatcatattccagacgaagtatcgtatcagtctgcagctatgacagaaccattagcatgtgcatatcatggcgtttctaagattcaagtcaattcaggcgatgtagcagttgtaatgggacctgggccaatcggattacttgtagcacaagtgttaaaaagtaaaggcgcaactgttgtggtaactggattggacaatgacaaagtcagattagataaagcagaagcattgcacatggattatgtagtcaatttacaacaaacagacttaaaaacgtatatcaatggaattacagacggttacggtgcagatgttgttgttgaatgttcaggtgcagttccagcagcacgacaaggtttggatattttacgcaaaaaaggtttctacagtcaaataggtatttttaaggatgctgaaattccatttgatatggaaaaagtgattcaaaaagaaataacagttgttggtagtagaagtcaaaagccagcagattgggaaccttcattgcaacttatggcggatggtttagtaaatgctgaagctttggtgacaaaaatatatgatatttcgaaatgggacgaggcgtatcaacatttaaaatccggcgaaggtattaaagtattacttaagccgctcgatttagatgaaaatgaaggagagaattaatatggtagaatcaatgctaacttttatgcttgggccattaagacaaatcactgatttttatatggaacatttactcgtaagtaattccattgtcattgcaggttattttgcgacaggtatttttaaaaagaaaaaagttgtgaattaaatcaaatttgaggtgatttacaagtgaaagcattgaaattatatggcgtggaagatttacggtatgaggataatgaaaagccagtcattgaaagtgcgaatgacgttattattaaagtacgagcgactggcatatgtggttcagacacgtcacgatacaaaaaaatggggccatacattaaaggtatgccatttggtcatgaattttcaggtgtagtagatgccattggaagtgatgttacgcatgttaatgtgggcgacaaagtgacaggttgcccagcaataccttgttatcaatgcgagtattgtttaaaaggtgaatatgcacgatgtgaaaagttattcgtcattggctcatatgaacctggatcgttcgcggaatatgtcaaattgccagcgcaaaatgttttaaaggttccagacaatgttgattacattgaagcagcaatggttgagccatcagccgttgttgcgcatgggttttataaatcgaatatacaacctggtatgactgttgcagtaatggggtgtggcagtataggtttgttagctattcaatgggcacgaatatttggtgctgcacatatcatcgctatagatatagatgcgcataaactagatattgcaacatcattgggcgcacatcaaacaatcaattcaaaagaagaaaatcttgagaaattcatcgaaaatcattacgccaatcaaatcgatttagctatagaatcatcaggtgctaaagttacgattggtcaaatattgacgctacctaaaaaaggtggcgaggtggtattactcggaataccatatgatgatattgagattgatcgcgttcattttgaaaaaattctgcgtaacgagttgacagtatgtggctcttggaactgtttgtccagtaattttccgggcaaagagtggacggcaaccttacattatatgaagacgaaagatattaatgtaaagcctattatttctcattttttaccgttagaaaaaggcccggagacatttgataaattagttaacaagaaagaacgatttgataaagtcatgtttacgatttattagtatgcacctttgaggacgaaaacgctggtatagttatagctatgaaagtgcgaatgccgtctggtctatagatactatcgaaataattcatcttcgaatatacgttgataaatagccggtttacttgtgtgaaatatgcttgtgaatcggttgttttgcattttgtatacttaaaatgagatggcaatatttgataatttttaaagtgaaaatcaagtacagccacttaataagataaatttattataatatatggtaaaatgatggcagtaataatgaatttgaaaaagagtaaacattaatacctttaacaatttaatatcgtcagagttaatgattaactgcatggcaaaacaacttagaatggtcagttacaaaaatacatttttataaaaaattatcacactattgtgacaactatctttggattaataaaagaggcaagtgagcaataggttaggcttatgtgcgggcataggtcagtaatgtataaatggaaatgatgtaatgacagaatggaggacaacatgatttatgcaggtattttagcaggaggtattggttcgagaatggggaacgtgccattaccaaaacaatttttagatattgataataaaccgattttaatccatacaattgagaagttcattttagtgagtgaatttaatgagattattatcgcaacgccagcacagtggatttcccatacacaggatattttaaaaaaatataacattacagatcaacgtgtcaaagtagttgcaggtggtacggatcgaaatgaaacaattatgaacattatcgaccatattcgcaatgtaaatggaattaataatgatgatgtgattgtaactcatgatgccgtaagaccatttttaactcaacgtattattaaagagaacattgaagtagcagcaaaatatggtgcagtagatacagtcattgaagcaattgatacgattgtaatgtctaaagataaacagaacatacacagtatccctgtaaggaatgaaatgtatcaaggccaaacaccacaatcatttaatattaaattattacaagatagttatcgcgccttaagtagtgaacaaaaagaaatcttatcagatgcatgtaaaatcattgtcgaatctggacatgcagttaaattggtacgtggagaactatacaacattaaagtgacaacaccgtatgatttaaaagtagcaaatgccattattcaaggtgatattgccgatgattaatcaagtatatcaactcgttgcaccgagacagttcgacgtcacatataataatgttgatatttatggtaatcatgtcatcgtaagacctttatacttgtctatttgtgcagctgatcaaaggtattacacaggtcgaagagatgaaaatgtactacgcaaaaaattaccaatgtcattagttcatgaagctgttggtgaagttgtatttgatagtaaaggggtatttgaaaaaggtacgaaagtagtaatggtaccgaatacacctacagagcaacatcatattattgcggagaattacttagcctctagttattttagatctagtggttatgatggttttatgcaagactacgttgtgatggcacatgatcgtatcgttccgctgcctaatgacattgatttgagtacgatttcatacacagagttagtgtcagtaagttatcatgctatacaacgatttgaacgtaaatctatacctttgaaaaccagctttggtatttggggtgatggtaacttaggttatattactgctattttgctacgtaagttgtacccagaagctaaaacttatgtatttggtaagacagactataaattaagtcatttttcatttgtagatgacatctttacagtaaatcaaataccagatgatcttaaaattgatcatgcatttgaatgtgttggaggtaaaggaagtcaagttgcacttcaacaaatagttgaacatatttcaccagaaggcagtattgctttgttaggcgtaagtgaattacccgtggaagtgaatacacgattagtacttgaaaaaggattaacgttgattggtagtagtcgaagcggctctaaagattttgagcaagttgttgatttatatcgtaagtacccagacatagttgaaaagttagcattattaaaaggacatgaaattaatgtatgtacgatgcaagatatcgtccaagcgtttgaaatggatttatcgacatcttggggaaaaacagtattgaaatggacgatttaataaaccgatgggggaataacaatgacaaaaacgaaacaagcaatacatattgataacatatactgggaacgtgttcagttatatattgaaggacatagtgaaggtgtcgatttaacatcaggacaatttgttctgaggaatttaaccgaaacaaaaacattagaagcaaatgaaatgaaaatagacggtaatacatttatatgtagattcaacgtcgcaatattagacgatgggtattatttaccaatggataaatatttatttgtttatcatgaccagttagagtatattggacaacttaatccaaatattattgatcaagcttatgcggcattaaatgaagagcaaattgaagaatacaatgagctgactacacaaaatggaaaagtgaactatttattagcgtatgatgctaaagttttccgtaaaggtggcgtatcacaacatacggtctataccattactccggaaatagcaagtgacgttaacgaatttgtatttgatattgaaatcaccttacctcaagagaaatcaggggtcattgcgacaagtgcacactggcttcataaacaaggtcataaagcttcatttgaaagtagaagtttcttatttaaagctatttttaatattacaaagttactacatattaaaagaagcaaaacaatattattcacatcagattcgcgtccgaatttatcagggaatttcaagtatgtatatgatgagttactacgccaaaaagtagattttgattatgatattaaaacggtatttaaggagaatattacggatagacgcaaatggagagacaagtttagattgccatatttacttggtaaggccgattatatttttgttgatgatttccatccattaatttatacggttcgctttagaccatcacaagaaattattcaagtgtggcatgctgttggtgcctttaaaacagttggctttagtcgtacaggtaaaaaaggtggtccgtttatcgattcattaaaccatcgtagttacacgaaagcatatgtttcatcagaaaccgatattccattttatgctgaagcatttggaattagagaagaaaatgttgtaccaacaggtgtaccacgtactgatgtactatttgatgaagcttatgcaacacaaattaaacaagagatggaagatgaattgccaattataaaaggtaagaaagttattctattcgcaccgacatttagaggtaatggtcacggtacggcacattatccattttttaaaattgattttgaacgtttagcaagatactgcgagaagcataatgcagttgtgttattcaaaatgcatccgttcgtaaaaaatagacttaatatttcacgtgaacatagacaatactttatcgatgtgtcagatcatcgtgaagttaacgatattctctttgttacagacttgttgattagtgattattcatctttaatatatgaatatgcagtatttaaaaagccgatgattttctatgcatttgacttagaagattacattacgacgcgtgatttctatgaaccatttgaatcatttgttccaggtaaaattgtacagtcctttgatgcattaatggatgctttggacaatgaagattatgaggttgaaaaagttgtgccattcttagataaacattttaaatatcaagatggtcgctcaagtgaacgtttagtcaaagatttgtttagacgctaatgttggcatatattacttgccatgcaaatgagtcataaggcatagttttcaagaagggttctgacaatgaagtgagcaacatgtcatgatgagaagcaggactatacaatgagaataaccttttgatttttcatgcataaggcgattcaatcaaaagcaatcaccttccaactgaattgtcattttgtaaaataaaataatcgatccaatcgttatctaattcataaatgtgtaaacacatacgttatgaatggataacgattttttgttatgttaaagtggtacattaatcatgtatttcgtatgataattaacgacaagtgtaatggttaaatgtattttatgatgaaatgctataataggcatggttacaatgagcttgctcatacatattaatataattacaaaaacacgtcggaggtacgacatgattaaaaatacaattaaaaaattgatagaacatagtatatatacgacttttaaattactatcaaaattgccaaacaagaatctaatttattttgaaagctttcatggtaaacaatacagcgacaaccccaaagcattatatgaatacttaactgaacatagcgatgcccaattaatatggggtgtgaaaaaaggatatgaacacatattccaacagcacaatgtaccatatgttacaaagttttcaatgaaatggtttttagcgatgccaagagcgaaagcgtggatgattaacacacgtacaccagattggttatataaatcaccgcgaacgacgtacttacaaacatggcatggcacgccattaaaaaagattggtttggatattagtaacgttaaaatgctaggaacaaatactcaaaattaccaagatggctttaaaaaagaaagccaacggtgggattatctagtgtcacctaatccatattcgacatcgatatttcaaaatgcatttcatgttagtcgagataagattttggaaacaggttatccaagaaatgataaattatcacataaacgcaatgatactgaatatattaatggtattaagacaagattaaatattccattagataaaaaagtgattatgtacgcgccaacttggcgtgacgatgaagcgattcgagaaggttcatatcaatttaatgttaactttgatatagaagctttgcgtcaagcgctggatgatgattatgttattttattacgcatgcattatttagttgtgacacgtattgatgaacatgatgattttgtgaaagacgtttcagattatgaagacatttcggatttatacttaatcagcgatgcgttagttaccgactactcatctgtcatgttcgacttcggtgtattaaagcgtccgcaaattttctatgcatatgacttagataaatatggcgatgagcttagaggtttttacatggattataaaaaagagttgccaggtccaattgttgaaaatcaaacagcactcattgatgcattaaaacaaatcgatgagactgcaaatgagtatattgaagcacgaacggtattttatcaaaaattctgttcattagaagatggacaagcgtcacaacgaatttgccaaacgatttttaagtgataacttaaaaacaataaaaaattataaattaattagttaagtgatataaataataaacgaaatgtttgcttgtatgttattatttgtgtatgaaaacgtctgatataatgtaatataggtttaaacaaaatatgctaaaatataagcaaaatatgtataattttaagtaatacacagacatttagagttttgattttaaaatgagttttcaattggaaaatgcaacgaaatttaaataattaaatatagatatagttgaatggaggaagtattttatgaaatacgctggtattctagctggaggtataggctcaagaatgggtaacgtacctttacctaaacaatttttagatttagacaacaaaccgattttaatccatacattagaaaaatttattttaattaatgattttgaaaaaattattatcgcgacgccacaacaatggatgacgcatacgaaagatacacttagaaaattcaaaatttctgatgaaagaattgaagtcattcaaggtggtagcgatcgtaacgatacaattatgaatatcgttaaacatattgaatcaacaaatggtattaacgatgacgatgtcattgtgacacatgatgcagttagaccatttttaacgcatcgtattattaaagaaaatattcaagctgctttagagtacggtgcagtagatacagtgattgatgctatagatacgattgttacatctaaagataatcaaacgattgatgcaattccagtgcgtaatgaaatgtaccaaggtcaaacacctcaatcgtttaatattaatttattaaaagaaagctatgcacagttgagtgatgagcaaaagagtattttatctgatgcttgtaagattattgtagaaacaaacaaaccggttcgacttgtaaaaggtgagttatataacattaaagtaacaacaccttacgatttaaaagtagcgaatgctattattcgaggtggtattgccgatgattaatcaagtatatcaattagttgcacctagacaatttgaagttacgtataacaacgtagatatttacagtgactatgtcattgtacgtcctttatatatgtcaatttgtgctgccgatcaaagatattatactggtagccgtgatgagaatgtcttatctcagaaattgccaatgtctttaattcatgaaggtgttggtgaggtcgtatttgacagtaaaggtgtgtttaataaaggtacaaaagtagttatggtaccgaatacgccgacagaaaaagacgatgtcattgctgaaaactatttaaaatcgagctacttcagatcaagtggacatgatgggtttatgcaagattttgtgttgctaaatcatgatagagctgtaccactacctgatgatattgatttaagtattatttcatatacagagcttgtaacagtaagtttgcatgctattcgtcgttttgaaaagaaatctatttcaaataaaaatacatttggtatttggggtgatggtaacttaggttacattacagccattttattacgtaaattatatccagagtctaaaatatatgtctttggtaaaacagattataaattgagtcacttctcatttgttgatgatgtcttctttattaataaaatacctgaaggcttaacatttgatcatgcatttgagtgtgtgggtggtcgcggtagtcaatcagccataaatcaaatgatcgattacatttcaccagaaggaagcattgcactgttaggtgtaagtgagttcccagtagaagttaatacacgtctagtattggaaaaaggactaacgttgattggtagtagtcgaagtggttcaaaagatttccaagatgttgtagacttatacattcaatacccagatattgtagataaattagcgttgttaaaaggtcaagaatttgaaattgcaacaattaatgatcttacagaagcttttgaagcagacctgtctacatcttggggtaaaacagtattaaaatggattatgtaaatagaaaaggatgaattaacgttggttaaaagtaagatatatatagataaaatctattgggaacgtgttcagttattcgttgaaggacatagtgaaaacctagatttagaagatagtaattttgtattaagaaatttaactgagacacgtacaatgaaggcgaatgatgtcaaaatagatgggaatcaattcgtttgtcgtttcaatgtagctatcttagataatggttattacttacctgaagataagtacttattagtgaatgagcaagaacttgattatattgcacagttaaacccagatgtgattaatgatgcatatcaaaatctaaagccagaacaagaagaagaatacaacgaattagaaacacaaaatggtaaaatcaatttcttattgcagacttacctaaaagaatttagaaaaggcggcatttcgaagaaaacggtttatactgttacacctgaaatttctagcgatgttaatgaatttgtccttgatgttgttgtaacgactccggaagttaaaagtatttatatcgttcgtaaatataaagaattacgtaagtatttccgcaaacaatcatttaatacaagacaatttatttttaaagcgatatttaatacgacgaaatttttccacttgaaaaaagggaatacggtgttgttcacatcagactctagaccaacgatgtctggaaactttgaatacatctataacgaaatgttacgtcaaaatttagataaaaagtatgatattcacactgtttttaaagcgaatattacagatagacgtggcatcatcgacaagtttagattgccatatttacttgggaaggcagactacatctttgttgatgactttcacccattgatttatacagtgcgttttagacgttctcaagaagttattcaagtatggcatgccgttggtgcctttaaaacagttggctttagtcgtactggtaaaaagggtggaccatttattgattcattaaatcatcgtagctatacaaaagcttatgtatcatctgaaaccgatattccattctacgctgaagcatttggtattaaagagaaaaatgtagtgcctacaggtgttccacgtactgatgtactatttgatgaagcttatgcgacacagatcaaacaagagatggaagatgaattaccaattattaaaggtaagaaagtcattcttttcgcaccaacatttagaggtagtggtcatggtacagcacattacccatttttcaaaattgattttgaacgtttagcaagatattgcgaaaaaaataacgcggttgtattatttaaaatgcatccatttgtgaaaaatagacttaatattgcagacaaacataaacaatattttgttgacgtttctgactttagagaagttaatgatatactgttcataacagatttattaattagtgactattcatctttaatatatgaatatgcagtatttaaaaagccaatgattttctatgcatttgatttagaagattatattacgacgcgtgatttttatgaaccatatgaatcatttgttccaggtaaaattgtgcaatcatttgacgcattaatggacgccttggacaatgaagattatgaaggagaaaaagtcattccattcttagataaacattttaaatatcaagatggccgatcaagtgagcgtttagtcagaaatttatttggtagctaagtttatatagtagtcaaagtgggagaggtataatgatgaaattttcagtaatagttccaacatacaattcagaaaagtatataacagaattacttaatagccttgcgaaacaagattttccgaaaactgaatttgaagtggttgtagttgatgactgttcaacagatcaaacgttacaaatagttgaaaagtatcgcaataaattgaacttgaaagtaagtcaactcgaaacaaattctggtggtccaggtaaacctagaaatgtggcgttaaaacaagcagaaggtgaatttgtattatttgtggactccgatgactatataaacaaagagactttaaaggatgcagcagcatttattgatgaacatcactcagatgtcttattgattaaaatgaaaggtgttaatggtcgtggtgtaccacaatctatgtttaaagaaacagcacctgaagttactttgttaaattcaagaattatctatactttaagcccgactaaaatctatagaacagcattactaaaagataatgacatttattttccagaagaattaaagagtgcagaagatcaattatttacaatgaaagcatatttaaatgcaaatcgaatcagtgtgttaagtgataaagcgtattattatgctacaaagcgtgaaggtgaacatatgagtagtgcgtatgtttcacctgaagacttttatgaagtcatgagattgattgctgtagaaatattaaatgcagatttagaagaagcccataaaaatcaaatcttagcagaatttttaaatcgtcattttagtttttctcgtacgaatggcttctcacttaaagttaaactagaagatcaaccacaatggattaatgctctaggagactttatacaagcagttccagaacgtgtagatgcattggtgatgagtaaattacgaccattgttgcactacgcgagagcgaaagatatagacaactatagaactgtggaggaaagttaccgtcaaggtcaatactaccgttttgatattgtagatggtaaattaaacattcaattcaatgaaggcgaaccatactttaaaggcattgatatcgctaagccaaaagtgaaaatgacagcatttaaatttgataatcataaaattgttacagagctaacgttaaatgaatttatgattggcgaaggacattatgatgtcagacttaaattacattcacgaaacaagaagcacacaatgtatgtacctttaagtgtcaatgcgaataaacaatatcgttttaacattatgttagaagatattaaagcgtatttacctaaagaaaaaatttgggatgttttcttagaagtccaaataggtacggaagtatttgaagtgcgtgttggtaatcaacgtaataaatatgcatatactgcagaaacaagtgcattaattcatttgaataatgatttttatagattaacaccgtatttcacaaaagactttaataacatttcgttatactttacagctattacattaacggattcaatctcattgaagttaaaaggtaaaaacaaaatcattttaactggtctggatcgtggttatgtatttgaagaaggtatggctagtgtcgtactaaaagacgacatggtgatgggaatgttaagccaaacatcagaaaacgaagtgcaaatcttacttagcaaagatattaaaaagcgagacttcaaaaatattgttaagttaaacactgcacatatcacttatccactaaataaataataaatgccctcaaatcattgtgagccaacatgatttgagggctttattttgctgtttatgacatgattatgacatttccctgattttcattttcatatacattaaattgtatacactggaaatgaggaggttatctataatgataaataaaaatgacatagtagcagatgtagtaactgattatccgaaagcagcggatatttttagaagtgtgggaatagatttttgttgtggcggacaagtaagtatagaagcagcagccttagaaaagaaaaatgtagatttgaacgaattattacagcgtctcaacgacgttgaacaaacgaatacaccaggttcgttaaatcctaaatttttaaatgtttcatcacttattcaatatattcaatcagcatatcatgaacctctaagagaagaatttaaaaatttaacaccttatgtgacgaagttatcgaaagtacatggacctaatcatccatatttagttgagttaaaagaaacatacgatacatttaaaaatggcatgttagagcatatgcaaaaagaagacgatgtcgattttccaaaactcattaaatatgagcaaggtgaggtagtagacgatattaatactgtgatagatgatttagtttcagaccacattgcaacgggagaattgttagtaaaaatgagcgaattaacatctagttatgaacctccgatagaagcgtgtggtacttggcgacttgtttatcagagattaaaagcacttgaagtgttaacacatgaacacgtacatttagagaatcacgtattatttaaaaaagtatcataaataacgcgattagaaactgttggcaaaaataagtccagcagtttttcgctatgtataaaagtcataatagtgacataaacagcattatttgaaaagaaaaatggtcaacttagcataaaaattgatatgaaaatttaatggtatagataattaaatagtagcgtgtttttttaataatttattcatgaattttacatgcactattatgataaaataaacataattataattcactgaggtgctatcgtgctatcgctaacaatgttattacttgagcgtgtaggtttaattattattttggcctatgtgttgatgaatattccatattttaaaaacttaatgaatcgtcgacgtacatggaaagcacgttggcaattatgtattattttcagtttgtttgccttaatgtctaatttaactggtatcgtcatcgatcatcaacatagtttgtcaggaagtgtgtacttccgtttagatgatgatgtatctttagctaacacacgtgtattaacgataggtgtcgcaggattagttggtggcccttttgtaggtctatttgttggcgttatttcaggtattttcagagtgtatatgggtggggcggatgcacaagtttatcttatctcatctatatttattggtataattgctggttattttggcttacaagctcaaagacgcaagcgttacccgagtattgcgaaaagtgccatgattggaattgttatggaaatgattcaaatgttgagcattttaacattttcccacgacaaagcatatgcggttgacctcatatcattaattgcactaccaatgattattgttaatagcgttggtacggcgatttttatgtctattatcatttcaacattaaagcaagaggagcaaatgaaggctgttcaaacacatgatgtactgcaattgatgaaccagacattgccgtattttaaagaaggattgaatagagaatcggcacagcaaattgcgatgattattaaaaatttaatgaaagtatctgccgtagcaattacaagcaaaaatgaaatcttatcgcatgtaggtgcaggtagtgatcatcacataccaacaaatgaaatattaacaagtctgtctaaagatgtattgaaatcaggaaagttgaaagaagttcatactaaagaagagattggttgtagtcatccgaattgcccgcttagagcagctatcgtgataccacttgagatgcatggttctatcgtcggtacattgaagatgtattttacaaaccctaatgatttaacttttgtggaacgtcaacttgcagaaggattggcaaatatttttagtagccaaattgaacttggtgaagccgaaacgcaaagtaagttattgaaagatgctgagattaagtcattacaggcacaagtgagtccacattttttcttcaattcaattaacacgatctcagctttagttagaataaatagcgaaaaggcacgagagttactattagaattgagttattttttcagagcgaatttacaaggctctaagcaacatacgattactttagataaagagttaagtcaagtgcgtgcatacttatcactcgaacaagcacgttatccaggaagatttaatatcaatattaatgttgaagacaaatatcgcgatgtgcttgtaccaccatttttaattcaaattttagttgaaaatgccatcaaacatgcgtttacgaatcgaaagcaaggtaacgatattgacgtgtcagtgattaaagaaactgcaacacatgtacgtattattgtacaagataatggtcagggtatttctaaagataaaatgcatttgttgggagaaacatctgtagaatcagagtctggaactggtagtgctttagaaaatttaaacttacgcctaaaaggattatttggaaaatccgcagcattacaatttgaatcgacatcgagcggtaccactttttggtgtgtacttccttatgaaagacaagaggaggaataaatatgaaagcattaatcatagatgatgagccattagcacgtaatgaattaacatatttattaaatgaaattggtggttttgaagaaattaatgaggcagaaaatgtaaaagaaacattggaagcactactgatcaatcaatatgacattatatttttagatgtcaatttaatggatgaaaatgggatcgaattaggagctaagattcaaaagatgaaagagccacctgcgattatttttgcaactgcacatgaccaatacgcagtacaggcatttgaattaaatgcgacagactatattttgaaaccgtttggtcaaaaacgtattgaacaagcagtcaataaagtgcgtgcgactaaagccaaagatgataataacgcaagtgcaattgcgaatgatatgtcggcgaattttgatcaaagcttacctgttgaaattgacgataaaattcacatgttaaagcaacaaaatattattgggattggcacacataatggtattacaaccatacatacaacgaatcataaatacgaaacaacagagccattgaatcgttatgaaaaacgattgaatcccacttattttatacgtattcatcgttcatatattattaacacgaaacacattaaagaagtgcaacaatggtttaactatacttatatggtaatattgacaaatggtgtcaagatgcaagttggacgttcatttatgaaagattttaaagcgtcgataggattactttaacagtaatccttttttttatgcattttacctatgatattttgtatttcggactaaaaatcacgcaaatcgaagtgagccatctatactttagttaaatcaaacgtaggaggcaatggtcgtgaaacaacaaaaagacgcatcaaaaccagcacacttttttcaccaagtcattgtaattgctttagtactctttgtatcgaaaataattgaatcatttatgccaattcctatgcctgcatcagtaatcggtttagtattattatttgtattattatgtactggtgctgttaagttaggcgaagtcgaaaaagtaggaacgacactaacaaataacattggcttactcttcgtaccagccggtatctcagttgttaactctttaggtgtcattagccaagcaccatttttaatcattggactaataatcgtctcaacaatactattacttatttgtactggctatgtcacacaaattattatgaaagttacttcgagatctaaaggtgacaaagtcacaaaaaagatcaaaatagaggaggcacaagctcatgattaaccacttagcactaaacacaccttacttcggaatactgttatccgttataccatttttcttagcgaccatattatttgaaaaaactaatcgtttcttcttattcgcaccgctatttgtcagtatggtatttggtgtggccttcctctatttaacaggcattccgtataagacttacaaaataggtggagacattatttacttcttcttagaaccggcaacaatctgttttgcgattccgttatataaaaagcgtgaagtgcttgttaaacattggcatcgtatcatcggaggtattggtatcggtacagttgtagcgttattaattattttaacttttgcgaagttagcacaatttgccaatgatgttattttatcaatgttacctcaagcagcaactacagcgattgcgttaccagtatcagctggtatcggtggtataaaagaattaacatcattagcagttattttaaatggtgtcattatttatgccctaggtaataaattcttaaagcttttccgaattactaaccctattgcccgaggattagcacttggaacaagtggtcacacattaggtgtagcaccagccaaagaattaggacctgtagaagaatcaatggcaagtatagctttagtgttagttggtgtagttgttgtagcagttgtgcctgtctttgtagcaatattcttctaaaacgaaaaacctaagcaagataatagcaatttgagccattgttattatcgtaaaaaaacgtctatactccagtttataactgggatatagacgtttttatgtatttattactttttactaggaatataaaactgtgcatgacgataatgaaatacgatgtcagatgaatcaaagggtttgccagtcattgtataaaaagtctggtggtaacgtaaacatggttcacctgtagacaattgtagtaatgaagcttcacttgaagtgagttgatctacattaaagaaaatatctgaaaaaccaatacgaagtttcatgtttgattctaaatagtcgaagatagagcccttagcaatatcatcatttaaatatttcacgatttctttatgataataagaatattcgatacataaaacatcatcgtccacgaatcttaatcgctctaaatagtagacggtatcatctgcatttaattggagctcatcttgtacagatttaggtggcgttgcaatctccttaaaaacaagtaccttacttgtcattcggtgttcacctaaacttttagagaaaccattagtcttaaagacgttgatacgattggcatcagcaatatttctcacataaataccactgccttgtgcttgatagatcaaaccatcttgttccaataagcctaatgctttaatgatagtactcttacttacttgataacgttcttttaattgcgtcacgcttggcaatttatcaccgggtttgaaattagattgatgtataaacgcattaagttgcttagcaatatgttcatactttaacaatattctgtcctcgtttcactttgtctgtaattattatagcacaaaatattataattgtatcggcgtttacaaattgaaccggtacaattataattggaggtaagtaaatacattttcattctactatcaagttgagggggtaatatttatgagcaataaatataaagaacaagcccaagacattcttacagctgtaggtggtgtcgaaaacattgttgatgcaacgtatgatacgaagtgcattacaattcatatgcaacatacaattccttctacagcaaatgaagtgaaacaaatagttgatgtgacatctgtagcagaaaatgatacgcagttagtcataaaattaaatggaaatgtcgatgaagtgtatcagcaattacagcgattaattaagaatgctaatgtcgaagagagtgagaatactgacaatattaatagtcaagatacaagttatacacctcaagtaaaagtaacaacaccaattttagtgaaagcaccaatcgctggtcgtcgtattttacttaaagaagtaagagattcaatttttagagagaaaatggtaggtgaaggcttagcaatcaaagctcatgaagaatccaaagtaatcgcaccgttcaatggtttaatatctatgattgtaccaactaagcatgcagttggtattcaatcagaagacggtgtggacatagtcattcatattggcttgaatacagttgacttggaaggtaaagggttcaagtgctttgtaaagcaaaatgatcatgttgaagcagggcaaacgttgttgcaattcgaccagcaatatatacaacaacaaggctacaatgctgacgttattgtcgttattagcaactctgccgatttaggaaaagtagaactgacaatgaatgaaatcattacgactgaagatgttatttttaaaatatttaaaaactaggagtgtgttgtaataatgacaaaattaccgcaaaatttcatgtggggtggcgctcttgccgcaaatcaatttgaaggtggatatgataaaggtggtaaagggttaagtgtaattgatgttatgacgagtggtgcacatggcaaagcacgtcagattacagaatctatagatcccaatcactattatccaaatcatgaaggtattgatttttatcatcgttataaggaagatattgccttgtttaaagaaatgggattgaaatgtttacgtacgtcgattgcgtggacacgtatctttccgaatggggatgaagatgtgccaaatgaagaaggactcgccttttatgatcgtatctttgatgaattaattgcacaaggtattgaacctgttgtgacgttatcacattttgagatgccacttcatttagcgaaacattatggtggatttagaaatagagaagttgtcgattattttgtgcattttgcgcgtgttgtatttgaaagatataaagataaagttacatattggatgacgtttaatgaaattaataatcagatggacacatcaaatcctatctttttatggacgaattctggggtagcattgacagaaaatgataatcctgaagaagtcttgtatcaagtagcacatcatgaacttttagccagtgctttagcagttcgtcttggtaaagagattaatccgaagtttaagattggaacaatgatttcacatgtacccatttatccatattcgtgtcatccgaaagatatgatggaagcacaaattgcgaatcgcttacgtttctttttcccggatgtccaagtgagaggttattatccaagctatgctaaaaaaatgttggcacgaaaaggatatgatgttggatggcaagaaggggacgacagtattttacagcagggcacggttgattatattggctttagttattacatgtctacggctgtaaaacatgatgttgatactacagttgaaaacaacatcgtcaacggtggtttgaatcattctgtggagaatccgcatatcgcaacgagtgattggggttgggcgattgatccagatggcttaagatatacattgaatgtgttatatgatcgttatcagttaccactttttattgtggaaaatggttttggtgcagttgatgaagtggtagatggacatattcatgatgattatcgcattgaatatttaaaagcacatattacagcagcgatagaagcagttgatcaagatggtgtagatttaatcggttatacaccgtggggaatcattgatattgtttcatttacaaccggtgaaatgaagaaacgctatggtttaatatatgttgatcgagataatgatggtcatggcacgatggaacgcttgaaaaaagattcgttctattggtatcaacaagtgatagcatcaaatggagataaattataaaggtatattataagtattttagggttagagcccgagacataaattaatatagtaggacctacagtgttataatggcgggcccccaacacaaagaatttcgaaaagaaattctacaggtaatgcaagttggcggggccccaacacagagaaattcgaaaagaaattctacaggtaatgcaagttggggaaggacagaaataaattttgcgaaaatatcatttctgttccaatcccgtgatgttaaaattttaagaaaaaaataatgccactaactatgtatagtgttaatgtttgagtgtttatgaaagtctttaaccaaaattgatgacttactaatcaacgataacgatattgttaagtagatgattagtgtcacaaagaaattaaagtgatagtcaaacatagatacaaagtacagttagtggcattatatttagtgctcttttttagcgacaaaagtaatataattcatatctttacgcaatttagtcatcgttttaaacattttacaaaacattggtcgattttcttttttcaaagcattgttgataatctttatagttccaacaataccttcgtcataaattaaaccttttggtgtcattaaactcattggaccagtatgataatgcacatgattaaaaccagcttgattatataaatctaaccagccaagtttcgtctgcggtgagacattgacattaattgctgcagataatgatttaacaacatgtgtggcatgtgattcattaacgatgacaatatcatgtgttaacaagatacccccaggctttaagactcggtagtactcgcgtaatgctttttcctttatggcgatgggtaacattgttaacattgcttcatttaaaacgatatcgaattgattgtcatcaaagggcaatttaacagcattcgcttgttgaacttgaatatatgattcaagacctgctgctgaaatgttttcctgtgctttttctaatgctttcttatttatatcaacgccttgaatgtgacagccatatgtatgagctagataaatagatgttgtgcacatattacatgccacttctaacacttgtttatcttgtgaaaatgccccttgttgtattaaccaatctgttgcttctttaccaccggggcgtagacgagtttttcctaatttagctaaaaatgtatgaccagcttctttagacatagcataacctccttttaattgataattattatcattaatatagcatatttatatgcgataatttggaagttaaaaagattacaaaaaattgtcacttcatttataactaaacatgagtcaacaagcataggtttagtggaaaattatttctaatagatgatgttttataaagataaaaaagcacagccatgatatacgaatgttgcatgttatatgctaaaccttcatatcatagctgtgtttgattcatttaaacttgatttacttcttctagtagaggaatagatgcttgcgcgccgtgtttttgtacagtgagtgagctcgctttattaccaaaatcaatagcatctgctaagttatcttgcgacttgtttaagcgactgacaaatgcaccaataaatgtgtcgcctgcagcagttgtatcaatcgcatttactttataagcttcgatgtgttggctttgatttttagtagcaaaatatgtaccttgcttacctagcgtaatcaaaacagtcttaatgcctatagataaaaagtaattggcattgtctttcatagattgttcattagttactttaatcccagataacaattcggcttctgtttcgtttggcacaataatatcgattaatgataataattcattaggtaatgctttcgctggtgcaggatttaatactgtcgtcacaccatgtgccttggcaatttcaaatgcagatataatagccgggatgggtacttctaattgtgcaacgacaaagtctgcattgattatagcgtcttttgcgttaataacatcttcaggtgtcatcgtcatattcgcaccaccataaacatagatggtgttttgtccttctgcattcacagtgataaaggcttggcccgtttttgcttcagctgttttgataatatatgatgtatcaatatgagctactttaaaatcttctaagatgaaatcagcaacgccatcagtgccaattttagtaataaatgttgtgtctgcttgcatgcgtgcagtggcaatagcctggttggcacctttacctccgccgaatgctttttgtgcttcttcaacatgtaatgtttcgcctggttgtgcatatctttcaactgttaaaaattgatcgacattcgttgaacctaaaataacaactttgttggtcatgtgtacgctcctttcaagttataacttttaaaaagtaacattcgattctaatgcaatattagagtagggcgttgtttcaccagtacgaatattacctttatttaatgggtgagctaagttacttttcatttcttcgtgaggaatgaaaatgatttcgatttccgatgaaatcaattgtttaatttgttgcaattgtgtagggttatgttcttttatttcttctgctaagtatattttttggatttccatttcttctaacactgtagctaagacatcaataaagcgtggtaagtttttagttacagctaggtcgatacgacgatgatcatttggaattggcatgccagcgtcattaatcgttaataaatcaaaatgaccaattgtcgcgattgcttttgaaatatgttcatttaaaatagctgattttttcatgacatctacactccttattttataaatactgtaacagaagcggctactaaaatgagtactaagccgatgattgtaataaccatttcttttgacgttttatgttgttttaagaaataaataccagttaatgtagcaagcacaacggatgtttgagaaagaataaatccagttgctaaaccattcatattaggttgtgctgaaataagatatgttaaagcaccaaatgcaaagaagaaacctgaaataatttgtaaccacgtaattttattacggaatggattctctgctttcatattcataaagccataaatgactgcaacaattaccatacccattgcttgaggtaaaaaggcagttaggccatcaatagaagttgcttgcggtgcagctgaatataaccagtatccaaattcaccaattaacagaagtaccactgcacgacgtaaatttttggcgttacttgcttctttgcgttcactccaaactgtcatacgcgctccaattagaataacgactaaagctgtaaatccaatgattttatgaccaatgcctggccaatttcctaatgcaaagacaccccataaagatgcgcctaataattggaatgctgttgtgactggcatggcacgagatgagccgactaattcgaacgctttaaatgtaatgatttgtccgaatccccatcctgcacctgataataaggcgaatagcaaattggttccagtaggtaagccacttgatgtgactacggctaatataatagcgaagattaacgtacctacagtagcaccgataatttgatgtacaggtttaccaccaaactttgaagcgactgttgggaagaagccccagccaattaaggggcctaacccgataagtaatgcaacaatgctcatgttatacacctcatgatttgtttttagtaaaacgttttaccagtgccatcgtaccatttttatttgtaaaatgcatgcgttttcataaaaactgaaaacgtttaaatcatatttaaaaattcatacattattattttaatttcttagtaaaataattatgattaaaaaccctcagcattaaagcaacgctaagggcctaacaatgatgagtatatttcggaagatacgtagttagtttgaaagatgatagccagttgttgcacgaatttttaaagtcgttggtaattcaatcatatcaatggatttatctaagtgctgtaatcgttgaagtaataaggttaaagatgttttgccaatatcagttataggttgtgccacagtagttaaaggtggcgagacgtacgctgcataatcaatgtcgtcataacctattaatgagatatctttcgggatactgatgccatgttcaattagtcctcgtaaaatgccaatagcgagttcatcgttaatagcgaagattgcagtggcagattgaaccatgatgtcatcaacaatggttagcccaccgcgcttagataattcagtatggacgatttgtggttctggcaattgattcgcgcgcaaagtatcgacaaatccagcgacacgagtcgacatattcgccatcatgtcatatggtgcaacaattatcatatggttgtgaccgagttctattaaatgttgtgctgcaagttgtccaccttgatattcatttgtccgaacaaaatctgtatagccttgatggtcattttgatccagtacgacataaggtacatgatgtttctttagatagttatttagggcgtccggggatgatatgtattgtgcgataattaatccgtcaatacctcgatcaattaaatgtttaatattgtcatacaaatcagttgctgtagatgttaaaaagcataaatcaacatcagatggtttatggtcatgaatactttgcatcagtgctgagaaaaacggatttgttaagctaggcaaaatgacgccaatagtttgaattttactgccgcgcaattgttttgcatgtttattaggggcatagcctaaacgttctgaaacagcatgtacgttttttatcgttgttgcggaaaaacgactatcattatgatttaaaatatgtgacacagttgtaactgatacaccagcttctctagcaacatctttaattgacacttttttcatattatattccttctctttattgtgtaattaatcatacagttatatacccgattattatattcatcatatcatgataaacatttgatgacatatgaagacgtgaatgacttttattgtctacaaacagacgtctgaagtatacgattaaggttgagacgagagaatatattattaaggttaataccttttaatgattatgataacaagaattttaaaatgtttattgtgattaaaaatacaaaagtcattattttaaagaataaaatatttgtttttgaacaaagtattaaaaaacataacgaaatgatgtatattgaactatgtgattgaaaaaatttttaattaaggcttgttaaaacttaagagaggatgtttttaaatgcaattcaaattaaaagaagaagagattattagttttttagaattgaaatatccagaaaaagagttcgaatatggtcgtttgttagttggacaacataaacgtgatgatttagatgtttattactttggtgatacgtttttaatgtgcacgattatttcattcaagacatttgaaattaaagaaacagtagaattatcatatgatgctgttaatcgtattgtgttaaaagatggatggttatttagaaaaatgagaatagaaacaatgcaaaaagtgttaaaatacggtacatctaaattaatgttaactgattttcaaaaagagaattataataaatatattcaaggtcagaaacaacgcgtgatatttgaaaatggccattttgtctaattgatagtgaatataattagagtaagaggctgggacataaatccctaaaaaacagcagtaagataattttcaattagaaaatatcttactgctgttctctatttatacaatacttcgtattgaatggcttcgctttcctagggtgccgtctcagcctcggtcttcgactggcactgctccctcaggagtctcgccattaatactacgtattaacatgtaattttactttgaaatactttaaaaaaataagacactttgcccaacttacactaccaataaaaacttctgttagaattcctcaaaatgatatttcgcgacatgttaatgaaattgttgaaacgatacctgatagcaaattcgatgaattcagacatcatcgtggcgcaacatcctatcatccaaagatgatgttaaaaatcatcttatatgcatatactcaatctgtattttctggtcgtagaatagagaaattacttcatgacagtattcgaatgatgtggttagctcaagatcaaacaccttcttataaaactattaatcgttttagagtgaatcctaatactgatgcgttaattgaatctttatttattcagttcgcttatttttcttggatttcttgtatatcattttaaagtgataaagatatttcgaaacataattcttctattatatttaagatttaactgtttttggaatgatcatgtatgcagacaatgagccaaggatcatcaatacaatgctgactataaatgttacggttgcagctacacttggtgcatagtttagttgtaacatactgaaaactgtagtacttagtgctataccaaaggcgccacctaatgtaccactcattttatataatcctgtagctaaaccaactttttcattaggcatactgaaaattgcaatcgtaagtccaggtgttgcgactaaaccattacctatcgcacatatgacgaaaccaatgataactgcaatgacatattgtgatgccaataattgagtcatgctaataatagtgatgccgatgacagggaacaacggaccaatgatgagcatcaatttgccaccgaaacgtaatgttgctttttcacctaaacgaatcatcgcaactgccacaatggcatatggcaatgtaacaagtccagattgcgcagctgataaaccaaggtgtgtttgagcatatatgaaaaagaccactgttacgcctagaccgctatttaaaacaaagttatttaaaaatgcaccaatgaacggacggttgcgtaatactgagaaatcaataaaaggtacttcatgtcgacgttcgatgatgatgaatatcaacgtagtgatgataaaaatgctcagacaaatgattgaaaatgtactaaaccaaccttgttcgaatccttgtgttaacaataatgtaaagctaccaatcataacagcgaaaatcgacatacctttgtaatcgaatggatgacggtggctatgttgacttactttttcaggtgtgccttttagaagcaatatggcaatgaaagcaatgactatactaatgatgaaattcgtttgccatccgaaatttgaggcaattaaaccgccgataacaccagctaggccgatgccaccaacagtactaatcattagataactaatcgctcgtcttaaatgttctcctttaaattgattatttaacacgccaactgttgaaggtaacaagatagctgctgatagaccttgtaaaattctaccgatgatgagcagtgcagtgatgtccgatataattaatagaagagatgcaaacatactgattatgagacccatgtatgtcattctcagttgtcctattttatcagcaatatcacctgcagccaccatgaagatacctgtggcgaaggaagttaaactaatagataaatttaacacggcaggagaggtttgatacgtttgaccaacgagaggtcctatattaataaatgattgtgcaaacaaccaatatgttaatgcagacaacataatcgcaataataatattactgcgtggtgaagattgtgtgttattcacagatgtcactccttgtaaaaattaaatatagaaagtcatgagatgaagtgaacggatgtatagatgatcgttcactcacacataagtcatgatttccttacatatcataccacagttattgagaatgaatatcaattaattgcttgtataattgattttttatagtatgtttaagtgaaacagctttatttgaaagtgattaaagtaaatgaaggtacagaggagtgagaacaatgtgcacaggattcacaatacaaactttaaataatcaagtacttcttggacgcacgatggattatgattatccattagatggttcgccagcagtgacgcctagaaattatcgttggaaatctcgcactggcacgacaggccaaacgcaatatggctttattggcacaggaacagatatggaaggttttatttatggtgatggtgttaatgaacatggcgttgccatttcaacacaatatttccgaggttatagttcatatggatcaacacacaaagcggacgcgatgaatattacgcaaaatgaaattgtgacatggattttgggatatacaacaagcattgaagatatgaaacaacaagcatcccaaatacatgttgtagctgtatatttaaatgacatcggtgaagttccgccattgcattatcatgtttccgatgcaactggacatacagtcgaagtttcatttaaagagggtgaagtggttataaaagataatcctattggtgtcttaacaaatcatccagacttaaattggcattatagtaatttaagacaatatatcaatatttctccttatccagcaacagcaaatttattggaaggtgtaacgattgaacctttaggcaatgaagcaggtacatttggattgccaggtggatttacttcaactgagcgctttgtgagaatggcatttatgaaagcaaacattgctcaaaacaatgataaagaaatggatttaatgaatgcattttatttattagatgcggtaaatataccgattggaattgtacgtccgcatgatgctgacaatcactatacgatgtatcagaccgtaataaatttaactacaagaacgttatatattaagtattatggcagcaatgaattagtagcattaaagctcacagatgatttaattaatagaaaagatatgacgatttttaagcctgagaagcatatcactattagaaagttgaatgacaatcaatagcgattgataatggaatttggttgatatgatttgatggatgattactatcatgcattagcgttgaatcgcgaacatggacgaacgattagttgttaattttgaaaatttataaaaggttaaacgaatgcagtgagagatgtcattttaatatcaatgtatggctattttgtaatgacaatgtaatgagtttagtaaaacatttcgggaatattaaatagttggaaaatgagaattaaatcctttactcagttgtctaattcttttagtatgtgcagtacagtttaattgaaaactaactttaactttaatggaggatgttttatacatgaaaaaattaacagcagcagcgattgcaacgatgggcttcgctacatttacaatggcgcatcaagcagatgcagcagaaacgacaaacacccaacaagcacatacacaaatgtcaacacaatcacaagacgtatcttatggtacttattatacaattgattctaatggggattatcatcacacacctgatggtaactggaatcaagcaatgtttgataataaagaatatagctatacattcgtagatgctcaaggacatacgcattatttttataactgttatccaaaaaatgcaaatgccaatggaagcggccaaacatatgtgaatccagcaacagcaggagataacaatgactacacagcgagtcaaagccaacagcatattaatcaatatggttatcaatcaaatgtaggtccagacgcgagctattattcacatagtaacaacaaccaagcgtataacagccatgatggtaatggaaaggtcaattatcctaatggcacatctaatcaaaatggtggatcagcaagtaaagcgacagctagtggtcatgcgaaagacgcaagctggttaacaagtcgtaaacaactacaaccatatggacaatatcacggtggtggtgcgcattacggtgtcgactatgcaatgcctgaaaattcaccagtttactcattaactgatggtacagtagtacaagcaggttggagtaactatggtggcggcaatcaagtaacgattaaagaagcgaacagtaataactaccaatggtatatgcataataatcgtttaactgtttcagctggtgataaagtcaaagctggtgaccaaattgcatattcaggtagtacgggtaattcaacagcgcctcacgtacacttccaacgtatgtctggtggcatcggtaatcaatatgcagtagacccaacgtcatacttgcaaagtagataatacagaaaatcccaagttgcgatatcatacgcagcttgggattttttcgttttaataataggtataagtccattgtttgtcctctaaaacatgttgataaaaaggatcttggccaattaacttgatatcatctgcaagtgcttcaacttcatctaaatgatgggtagttaatataattaaacatttagatttcatgatgttaagtagttggtggatgtcatgtctagattttaaatcaataccaactgtcggttcatctaaaatgagaattcgaggttgacctagtaaacctactaatatattaattttacgtttattcccaccggacaatgtagatactttggcagacgtatcatcaaagtttaattgctgtaaatattcgttgatagttgtatcgttaattggatttttacaaagtgatttaaaaaatttaatgttttcagccactgtcatgtgttcaaataacgcaatgtcttgtggcacataaccgatgtgattttgtatttgtctttgattccatttttcgccgaaatagttgatagttccatcattagctttttcaataccagcaatcatacgaagtaatgttgattttccagcaccattatcaccaagtaatacggttaaacgattactatcaaaggacatagttaaatgattgaaaatctgtttgttacggtaacgctttgaaaggttattaatttctatcatcagttacgctcctttacatgaaaataatcaagtatacgatacccatagcaagtgcatatataaatgtcatgaataatcgatgacttattgtttgaatatggaataagataaagacgatacctatctcataaatcaatataagtaacagtgattttaagtaaaatattaagctgagtggttgagacaaatatagactaactgccaatagtaccaacaataacaaaatcgtatgtgtcattacataagtactatatagtttgaaacggcttaaatgatattgtgataatcgttgcaatgctgcttgttggtttaaacgataatgaagtactacttgaacagcgctaacaaataaaatcaccgcaaagattaagctaattgaaatagagtgttgtgcttgtttagtaagcgacacaaatttgattttagattcaggtgtatgtttatgataggacttgttgatagcatcgatggattgatgctgtttcatatcctcaaggtgttcataaataatgttaggaatttgctgctcatataatgaactactaacaatttctacagcaataccacctataaagtcatctctaccatataactgtatcgtttcttttaaacggttctcttttaatttttgagagaaacctttaggaatttgcatacttaaaatagcttcctttttagtaacatcatcttcaatatagctttcatcttcatcgacttttttaatagttacatagtcagattgtttaattttattgacgaatgattttgatgcagtggtttggtctaaatcttgaatggtaatcggtattttgaagttgtcatgtgctacacggtaaccgataccaataagtacgagtgcgatgacaatggttgttacgagcaagatgtattgtaaccattgcttgaacacaacaagttgtatataaggcttcattgacgatacctccaaaccaatacagctaaattaattatcaaaagtgcgatgaagctaagatagaaactagggtgcagttctaaaatgtagttgtttaaaataatttctaacaattgatttgttacaactgcgaacggttgaatattgaaaacaccatttgctatatgttgtaaaaaaatcgtaggtattgttaaaccagataacaccaggatgacaatagctaatatgactttactaatactattcaacaagcctgttgttaaaagttcgatgagtaataaccacagtattaaaaaggtaacataatagcttaaatgaatggctaacgttggccaattatataattcaaagatattcggaatactgaacacaatccaaactacaccaacgatactccataacatagtataaaaccatgtaatcaacgtacgaatgattaataaacgctctttagaaaaatgaaacattttcaatcgcgctttcaatacagtatcttgattcattttcaaaactgtaaataaagatagtgcaaagatgaataccgttgttaaaaatcctgtaattgcataataactgcccgtatcgtataaatgaatcggttctaagttaaatgcacctgaacggtttaatcctgtaatcagcaaatcagtcataacattgatactgtcagaatgtgatgctttcggtgctaagtcttgaaaagctaagatgccacccattgatcgcataagacgttggtaaacagaatctgttagctgagatagcacgacacttttcatggattgttgatcatatgtatatactgaaattggtagttcgccttgtttataaaatgccttggtcatacctttatcaaaaacaaaatagccttgaagtttatgtttttttaacaaagtatgtgcttgcttatcatcatatgctttaatgctcacgttttttcctaggttactccctttaccaatagagtttaagattaatttcgtttcacttgattgatctttatctacgacacctatattaaaatgattgtcatcttctgttacatgttggattgtcgttaatgtaataaggagtgccgctaatataaatagtaaatagataatcaaataccactttttcaataaaaaagagtggtagatgcgaaacaaatgtattgttttcatttaaccactcctccaatgataagattgaaaggcaagatgaccttccaatcttatttttatattttagttatttagatgccttttttaaaattgattcaaacattttgccgccatttttttcgatttctttttcaagtttttcacggtcttttgaagatagactattgaaatcttttgcaccactatcatcaaaatcaatatctgctttcaattttgtgctagattttaaaatgaaattaattggttcttcagcatatttgatgccgatatttaacgtagatttctgagtgttattttttacgtcagaatctatattattttcaaaagtgaattcattttcgtcgctatatttatctaatgcgacagtgattttacctttatcttgacgttttgtgccatctactttttcttggttatctaatttgatttttgattcatcatattctgtctttttaccaaattcgtatttatcattatatttattatctttttctttagaagatacgcctttaattgtatatttcgcttcagcatacgtgtatttatcttgatcgaaatcaagtgcgtaatctagttttaacttatcgtcttctaaagtattagtacctttgattttagttttattattttctttgtctgtaatagtaatttctcgttttacaatcgtatgtttttcggtataaattttagattgaattttagcaaattcatcctttttagtttctttgacatcgtcaattgcttttttgatgtctttttcaaagtcttttgtagcaccttgttcttccattaattttttaaggtctttatcctttttagcttcttctaatacagctaatgtaatttttttagtgtcagctctgctaagtgttaacgtgacaggtctaactttgtacttttcaccattaaccttaatttcttcttttttacctttatcaaaattatcgtcatctaatttgtcgacaataagttcggaatatttttcggcaattttgctgtagtcactttgttgtgcttgagcattattaaaaagagtatttaaatttagttgttggtttgtaataccattttcttttgctgtttcttcatcttcacctgtaagttttgaataagttgataataaatcagaattattaacactatatttccctttaaataatggtgattcgaaataatgcttatctttatctgcagctaactggaatttccctaatgcagagtctgcgattgttggttcaagattaatcattgatttctcttttttaggatcatgtccatatgacattttaattttcgatgcattaacaacagatttaggaatgccaagccctttaacaatttcatctgatgcatctgcgcttaattctaatgaagataaaaacgaattatctttcatcttttcttggaacttcacttcattttcaaaacggtcattaaaataatctttatacatttttgctgtttgttgttcactttttaggtatgtatttttcggtgtattagcaaaaaatgcataaactccccatgcgattccacctattaatagtaagacaataataataggaattataatttttaactttttagacattttgcttcctcccaattatttatgagttaatcatatcagaacaatacattttattaaatggtttattttaaattttgtttaaattaatagaattttagttataataatgtttaataagttattggaaatctaataaactacaaaaaatagtttgattacataatgattcttgaaaaatgttggttaacttaataatatgcatttttttggcgaagaagatttatttaacttataaaaatattgaagtaagattggggagattatgaatttatggaattgaaagtcgatgattttgtaaagaatataaaaagaccatacttgactgtattgggagtatttgtagttgcagtttcattattttttgacgcgattatgtttttctacgctaaactatatgataaattgcctatgtatttactggtgtttatggcctttacagctgtaattttgattatgatgtacatacaagagaaaaatgaaaattacaaagttgaaaaaagatatgtggttagatatctcacacttaacgttattgtgggatatactttgccattgctttttgtatctatttacgtttttggtgtagtcggttttggatttgatgttttcaattattgtctaggtattatcttgatgttatttatttcttggttaggtttatttttattttataaaaacgaatttgatagtgaaaatcctaatcctgcagttaatgccatagcaattattataaaattatttgcttttggaggaatattttatataagtctaatagttcctgtaacacagcaagaagagatttttatagggttaagtatattcatcaatataattgttgatgctcttcttgttaggtcatattttaattacgcgttatataagagtattaagaaagatatcgaaaatgaaggtaagacaatgtaaaggaaagacataaaaaataataggagtctaaccatgataatttttattttaataacaatatttgctatttattatatagctatgattgctagtttgtttaaaagtgaaggtttttcaataataggtttaatattagatgttgttataatggggacattgattttttactattttataggcgctcgctttgttgatcatgatttaagcaactttttaatgtttatggatactggatcatatatttttatgtactttgcaattaagtgtttatgggtgaaacctaaggtagtaaattatttgattgcaaaagaattgggtgaatctaaagaggtcattgaagagcaggaattagatttacagacatcaaagataagaggtatctactttttcattatttcagtagtgatgttaattatcactaaattaagaatgcaacctgagttacaggcagatgctatatcgatgaatcctgtatttatttttgttggtgttataatcattttaatttggctagtactggatatatatcgcaagaaaaaatacggtatattcttattcaagacgatagtgccactagttgttacgacttggattattatagctacaattatactttcgtaaacgattttgattaatggggaatgtagagaacatttctttgtaattttataatcgaataacatacaaaataaagcgaccaattttgcagtgttacgaattgtaaactgcgaactggtcgctttttattgatgtcatgattaatttaatggatgtaattatatgatgaaacttctgaagcagagatggttcttgatgaaacgatatattcaccaatccagttcatttctgaaattagaatacttccatcaatattaactttttcaacgtaggctacatgaccaaatggaccatttactgtttgtaaaattgatcctcgtgttgggtgtctatctactttgaagccattgcttgaagcttggcctgcccagtttttagcatctccccaaaatgtactaatcgtgtgtccatctttggcacgtttatcaaagacataccatgtacattgtccagcagtatataagttgttcttacttgtgataagaggctgatcaatgattttaccgttacctaatgctaaaggtttaccgtcagcggtctttgctttgtcattaaattcggcgatttgtaattcgtcatacaattcgtctaaatcgatgcctgtaataagccctttgttatcttttgaaaaagcgttatttaattcatcgtcattgtcttcgacattcggtattgctggtgtcaaaggattgcttggtgacgtttgaggcggtgtgtgtgaatcaattgcgtcattaatgtgcgtatactgaccacttaatgaagaatggtactgattgttgttaagatcacgttgatttgcgtgttgatgattgtcgtttgtacgtgactggttttgatgattgttgtttggcgtgttgtttttgtcatatgtataagtatacgcgccggtgtctttattcactttgaactgtgcgtttgggtgtgctttctttgcttcttctaatgttttgctatcattcgtatatgcttgagccgagttaggcgacatactaaataaagtaagagttgtcatcgtcagtaaaattgttttcttcataataaccatttaatcctttatgtatttaatttaattttagtatacacatttatattacaaaaatgaatggttaattaaaaatatatgggtatattcaatatatttatttaaaaaaagctaaaaatacttaaaaaactatatacatatactaataatttatatattatttgagtaaggagcactttttcaaaaaatagtgtccctaaaaagttttgataaacttaaaatattcaggaggtttctagttatggcaatgattaagatgagtccagaggaaatcagagcaaaatcgcaatcttacgggcaaggttcagaccaaatccgtcaaattttatctgatttaacacgtgcacaaggtgaaattgcagcgaactgggaaggtcaagctttcagccgtttcgaagagcaattccaacaacttagtcctaaagtagaaaaatttgcacaattattagaagaaattaaacaacaattgaatagcactgctgatgccgttcaagaacaagaccaacaactttctaataatttcggtttgcaataagcattctgaaattggcaaagtcacattttctaatgtggctttgcttatcatttttttaagaaaacaactgaaaggaaataagcatgaaaaagaaaaattggatttatgcattaattgtcactttaattattataattgccatagttagtatgatattttttgttcaaacaaaatatggagatcaatcagaaaaaggatcccaaagtgtaagtaataaaaataataaaatacatatcgcaattgttaacgaggatcaaccaacgacatataacggtaaaaaagttgagctgggtcaagcatttattaaaaggttagcaaatgagaaaaactataaatttgaaacagtaacaagaaacgttgctgagtctggtttgaaaaatggtggataccaagtcatgattgttatcccagaaaacttttcaaaattggcaatgcaattagacgctaaaacaccatcgaaaatatcgctacagtataaaacagctgtaggacaaaaagaagaagtagctaaaaacacagaaaaagttgtaagtaatgtacttaacgactttaacaaaaacttagtcgaaatttatttaacaagcatcattgataatttacataatgcacaaaaaaatgttggcgctattatgacgcgtgaacatggtgtgaatagtaaattctcgaattacttattaaatccaattaacgacttcccggaattatttacagatacgcttgtaaattcaatttctgcaaacaaagacattacaaaatggttccaaacatacaataaatcattattgagtgcgaattcagatacgttcagagtgaacacagattataatgtttcgactttaattgaaaaacaaaattcattatttgacgagcacaatacagcgatggataaaatgttacaagattataaatcgcaaaaagatagcgtggaacttgataactatatcaatgcattaaaacagatggacagccaaattgatcaacaatcaagtatgcaagatacaggtaaagaagaatataaacaaactgttaaagaaaacttagataaattaagagaaatcattcaatcacaagagtcaccattttcaaaaggtatgattgaagactatcgtaagcaattaacagaatcactgcaagatgagcttgcaaataacaaagacttacaagatgcgctaaatagcattaaaatgaacaatgctcaattcgctgaaaacttagagaaacaacttcatgatgatattgtcaaagaacctgatacagatacaacatttatctataacatgtctaaacaagactttatagctgcaggtttaaatgaggatgaagctaataaatacgaagcaattgtcaaagaagcaaaacgttataaaaatgaatataatttgaaaaaaccgttagcagaacacattaatttaacagattacgataaccaagttgcgcaagacacaagtagtttgattaatgatggtgtcaaagtgcaacgtactgaaacgattaaaagtaatgatattaatcaattaactgttgcaacagatcctcattttaattttgaaggcgacattaaaattaatggtaaaaaatatgacattaaggatcaaagtgttcaactcgatacatctaacaaggaatataaagttgaagtcaatggcgttgctaaattgaaaaaggatgctgagaaagatttcttaaaagataaaacaatgcatttacaattgttatttggacaagcaaatcgtcaagatgaaccaaatgataagaaagcaacgagtgttgtggatgtaacattgaatcataaccttgatggtcgcttatcgaaagatgcattaagccagcaattgagtgcattatctaggtttgatgcgcattataaaatgtacacagatacaaaaggcagagaagataaaccattcgacaacaaacgtttaattgatatgatggttgaccaagttatcaatgacatggaaagtttcaaagacgataaagtagctgtgttacatcaaattgattcaatggaagaaaactcagacaaactgattgatgacattttaaataacaaaaagaatacaacaaaaaataaagaagatatttccaagctgattgatcagttagaaaacgttaaaaagacttttgctgaagagccacaagaaccaaaaattgataaaggcaaaaatgatgaatttaatacgatgtcttcaaatttagataaagaaattagtagaatttctgaaaagagtacgcaattgctatcagatacacaagaatcaaaatcaattgcagattctgttagtggccaattaaatcaagtcgacaataatgtgaataagctacatgcgacaggtcgagcattaggcgtaagagctaacgatttgaatcgtcaaatggctaaaaacgataaagataatgagttgttcgctaaagaatttaaaaaagtattacaaaattctaaagatggcgacagacaaaaccaagcattaaaagcatttatgagtaatccggttcaaaagaaaaacttagaaaatgttttagctaataatggtaatacagacgtgatttcaccgacattattcgtattattgatgtatttactatcaatgattacagcatatattttctatagttatgaacgtgccaaaggacaaatgaatttcattaaagatgattatagtagtaaaaaccatctttggaataatgtcattacgtcaggtgttattggtacaactggtttggtagaagggttaattgtcggtttaattgcaatgaataagttccatgtattagctggctatagagcgaaattcatcttaatggtgattttaactatgatggtcttcgtacttattaatacgtatttactaagacaggtaaaatctatcggtatgttcttaatgattgctgcattgggtctatactttgtagctatgaataatttgaaagcagctggacaaggtgtgactaataaaatttcaccattgtcttatatcgataacatgttcttcaattatttaaatgcagagcatcctataggcttggtgctagtaatattaacagtacttgtgattattggctttgtactgaacatgtttataaaacactttaagaaagagagattaatctaatgttgatgaatagcgtgattgctttaacttttttaacagcatctagcaataatggcggacttaatattgatgtgcaacaagaagaggaaaagcgaatcaataatgatttaaatcaatatgatacaacgctatttaataaagacagcaaagcggttaatgatgcgattgctaagcagaaaaaagaacgacaacaacaaataaaaaatgatatgtttcaaaatcaagcgagtcactcgactcgcttgaatgaaactaaaaaagtgttattttccaaatctaacttagaaaagacttcggagagtgataaaagcccctatattcaaaacaagcaggagaaaaaaatattcccgtacattttgatgtctgtaggggcttttttgactttaggatttgtcattttttcaattcataaagggagacgaacgaaaaatgaatcagcacgtaaaagtaacatttgattttactaattataattacggcacatatgacttagcagtaccagcatatttaccgataaaaaacttaatagctttagtattggatagtttggacatttcaatatttgatgtcaatacacaaattaaagtgatgacgaaaggtcaattacttgttgaaaatgatcgactcattgattatcaaatcgctgatggagatattttgaagttactataggaggaaaaatagatggttaaaaatcataaccctaaaaatgaaatgcaagatatgttaacgcctttagatgctgaagaagcagctaaaacaaaattacgcttagatatgagagagattcctaagtcttcaattaaaccagaacattttcatttaatgtacttattagaacaacattctccatattttatagatgctgaattaactgaactacgtgacagtttccaaatacattatgacattaatgacaatcatacaccttttgataatattaaatcatttactaaaaatgaaaaattacgttacttactcaatatcaaaaatttagaagaagtaaatcgtacacgctacacatttgtgttggcaccagatgaattatttttcacaagagatggattacccattgctaaaacaagagggttacaaaatgttgttgatccattacctgtgtcagaagctgaatttttaacaagatataaagcgctggttatctgtgcattcaatgagaaacaatcatttgatgctttagttgaaggaaacttagaactacataaaggaacgccatttgaaactaaagttattgaagcggcaacgttagatttactaacggcatttttagatgaacagtatcagaaacaagaacaagattatagtcaaaattatgcatatgtacgcaaagtaggacataccgttttcaaatgggttgctatcggtatgacaacgttaagtgttttattaattgcattcttagcctttttatatttttcagtaatgaagcataatgagcgcattgaaaaaggataccaagcatttgtaaaggatgattatacgcaagtactaaatacgtatgatgatttagatggtaaaaaattagataaagaggcactttacatttatgccaaaagttatatccaaacaaataaacaaggtttagaaaaagataagaaagaaaatttacttaataatgtgacaccaaattcaaacaaagactacttattatattggatggaattaggacaaggacatcttgatgaagcgattaatattgccacttatttagatgataacgatattacaaagttagcgttgattaataaattaaatgagattaaaaataacggagatttatcgaatgataaacgttctgaagaaacgaaaaagtataacgataaattgcaagatattttagacaaagaaaaacaagttaaagatgaaaaagcgaaatctgaagaagagaaagcaaaagcgaaagatgagaaattaaagcaacaagaagagaacgaaaagaaacaaaaagaacaagcacaaaaagataaagaaaaacgccaagaagctgaaagaaaaaaatagtataggactgaggcaaagacaatgcataaattgattataaaatataacaaacaattgaagatgctcaatttgcgagatggtaagacatatactattagcgaagacgagcgtgcagatattacgttgaaatcgttaggcgaagtcattcatttagaacaaaataatcaaggtacttggcaagcgaatcatacttctattaataaggtgcttgttagaaaaggtgaccttgatgacattacattacagctttatacagaagctgattatgcatcatttgcgtatccttcaattcaagatacgatgacaattggaccaaatgcgtatgatgatatggttattcaaagcttgatgaatgccatcattattaaagattttcaatcaatacaagaatcacaatacgtacgcattgtgcacgataaaaatacagatgtgtatattaactatgaactacaagagcaactaacgaacaaagcttacattggtgatcatatttatgttgaagggatatggctcgaagtacaagctgatggtttaaatgtattgagtcagaatacagtggcatcgtcattaattcgcttaacacaagagatgccacatgcacaggcagatgattacaatacgtaccatcgttcgccaaggattattcaccgtgaaccgacggatgatattaagattgaaagaccgccacagccaatacagaagaacaatacagtgatatggcgttccattataccgccattagtaatgattgctttaactgttgtcatctttttagtgagaccaattggtatttatattttaatgatgattggtatgagtacagtaacgatagtatttggtattacaacgtatttctctgaaaagaaaaagtataacaaagatgttgaaaaacgagagaaagattacaaagcttatttggataataaatctaaagaaattaacaaagcgattaaagcacaacgttttagtttgaattaccattatccaacggttgctgaaattaaagatatcgttgaaacgaaagcaccaagaatatatgaaaaaacatcgcatcatcacgatttcttacattataagttaggtattgcgaatgtagaaaagtcattcaaattagattaccaagaagaagaatttaaccaacgtcgtgatgaactattcgacgatgctaaagaattgtatgaattttacacagatgtagaacaagcaccattaatcaatgatttaaatcatgggccaattgcatatattggtgcacgacatctcattttagaagaattggagaaaatgctaattcaattgtcaacattccatagttatcatgatttagagtttctatttgtgacacgtgaagatgaagttgaaacattgaaatgggcacgttggttgccacatatgacattgagagggcaaaacattagaggatttgtttacaatcaacgaacgcgtgaccaaattttaacgtcaatttatagcatgattaaagaacgtatccaagctgtgcgtgaacgcagcagaagtaatgagcaaattattttcacaccgcaattagtgtttgtcattacagatatgtcattaattattgatcatgtcattttagaatatgtaaaccaagatttatcagaatatggtatttcattaatctttgttgaagatgtgattgaaagtttgccagagcatgtagataccattattgatatcaagtctcgtactgaaggcgaactgattacgaaagaaaaagaattagttcaattgaaatttacacctgaaaatattgataacgtcgataaagaatatatcgcgcgacgtttggcgaatttgatacacgtcgaacatttgaaaaatgcaattcctgatagtattacatttttagagatgtataacgtgaaagaagtagatcagcttgatgtggttaatcgatggagacaaaacgaaacatacaaaacgatggcagtacctttaggtgtaagaggtaaagatgatattttatcattgaacttacatgaaaaagcacacgggccacatggtttagttgctggtaccactggttcagggaaatctgagattatccaatcatacattttatctttagctattaattttcaccctcatgaagttgcattcctattgattgactataaaggtgggggtatggcgaacttatttaaagatttagtccatttagttggtacgattacaaacttagatggcgatgaagcgatgcgtgccttaacatcaatcaaagccgaattgagaaaacgtcaacgtttattcggagagcatgatgttaaccatattaatcaataccataagttatttaaagaaggtattgcgacagaaccaatgccacatttattcattatttccgatgagtttgccgaattaaaatcagaacaacctgattttatgaaagaacttgtatcaacggcacgtattggacgttcgttaggtattcatttaatacttgcgacacaaaaaccatcgggtgttgttgatgaccaaatttggtctaactctaaatttaagttggcattaaaagtacaagatagacaagacagtaatgaaattttaaaaacaccagatgcagcagacattacattaccaggtcgtgcgtatttacaagttggtaataatgaaatttatgaattattccaatctgcatggagtggtgcaacatatgacatcgaaggcgataaattagaagttgaagataagacgatttacatgattaatgactatggtcaacttcaagcaatcaacaaagacttgagtggacttgaagatgaagaaacgaaagaaaatcaaactgagttagaagcggtcatagatcatatcgaatctattacaacacgattagaaatcgaagaagttaagcgtccatggctaccaccattgccagaaaatgtatatcaagaagatttagtagaaacagatttcagaaaattatggtcagatgatgcaaaagaagtggaattaacattaggacttaaagacgtaccagaagaacaatatcaaggaccgatggtattgcaattgaaaaaagctgggcacatcgcgttaatcggaagtccaggatatggtagaacaacgttcttacacaacattattttcgatgttgcaagacaccatcgtcctgatcaagcacacatgtacttgttcgatttcggtaccaatggtttgatgccagttacagacataccacatgtcgctgattactttacagtagatcaagaagacaagattgctaaggcgatacgtatatttaatgatgaaattgatcgtcgtaagaagattttaagtcagtatcgtgtcactagtatttctgaatatcgaaaattaactggtgaaacaattccgcatgtctttattcttattgataactttgacgcagtaaaagattcacctttccaagaagtttttgaaaatatgatgattaaaatgacgcgtgaagggctagcattagacatgcaagtaaccttaactgcttcaagagctaacgctatgaaaacaccaatgtacattaatatgaaaacgcgtatcgcaatgtttttatatgataaatcagaggtgtcgaacgtagtaggacagcaaaaatttgcggttaaagatgttgtgggtcgagcattgttaagtagtgatgacaacgtatcattccatattggccaaccatttaaacatgatgagaccaaatcatataatgatcaaattaatgatgaagtatcggcgatgacagaattttataaaggtgaaacaccaaatgatattcctatgatgccagatgaaattaaatatgaagattacagagaatcattaaacttaccagatatagttgcaaatggtgctttaccaattggattagattatgaaggtgttacactacaaaaaattaaattaactgaaccagcaatgatttcatcagaaaatccgagagaaattgcgcatattgctgaaattatgatgaaagaaattgacatattaaatgaaaaatatgcgatttgtatcgcagactcaagtggagagtttaaagcttataggcatcaagtggctaactttgccgaagaaagagaagacattaaagcgattcatcaactaatgattgaagacttaaagcaaagagaaatggacggcccatttgaaaaagattcactttatattatcaatgattttaaaacatttattgattgcacgtatattccggaagatgatgttaaaaagcttattacaaaaggaccagaacttggcttgaacattttatttgtcggcattcataaagaattaatagatgcttatgataaacagattgatgttgcacgtaaaatgattaaccaatttagtataggtattcgtatttcagaccaacaattctttaaatttagatttattcaacgagaacctgttattaaagaaaatgaagcatatatggtcgcaaaccaagcttatcaaaagattagatggtttaaatagcaatgaattaaataggagggaggtatgttatgaattttaatgatattgaaacaatggttaagtcgaaatttaaagatattaaaaagcatgctgaagagattgcgcatgaaattgaagttcgttctggatatttaagaaaagctgaacaatataagcgattagaatttaatttgagttttgcactagatgatattgaaagcacagcaaaggacgtacaaactgcaaaatctagtgctaataaggacagtgtaactgttaagggaaaggcgcccaatacgttatatattgaaaaaagaaatttgatgaaacaaaagcttgaaatgttgggtgaagatatcgataaaaataaagaatccctccaaaaagctaaggaaattgctggcgaaaaggcaagtgaatattttaataaagcaatgaattaatattgaggtgaagatatgggtggatataaaggtattaaagcagatggtggcaaggttgatcaagcgaaacaattagcggcaaaaacagctaaagatattgaagcatgtcaaaagcaaacgcaacagctcgctgagtatatcgaaggtagtgattgggaaggacagttcgccaataaggtgaaagatgtgttactcattatggcaaagtttcaagaagaattagtacaaccgatggctgaccatcaaaaagcaattgataacttaagtcaaaatctagcgaaatacgatacattatcaattaagcaagggcttgatagggtgaacccatgatgaaagatgttaagcgaatagattatttttcttacgaagaattaacaattttaggtggtagtaaattgcctctcgtaaattttgaattgtttgatccatcaaattttgaagaagctaaagctgctttaattgaaaaggaattagtaacagagaatgacaagttaactgatgcaggttttaaagtggctacattagtcagagagtatattagcgccattgtaaatattcgaattaatgatatgtattttgcaccatttagctatgaaaaagatgaatatattttgttaagccggtttaaaaataatgggtttcaaatacgaattatcaataaagacattgcatggtggtcgattgtacaatcatatcctttattgatgagacaagaaaagtccaatgattgggactttaaacaaattgacgatgaaacattggagaacttaaataatgaaagtatcgatacgattgggcgtgttttagaaattgaaatatacaatcatcaaggtgaccctcaacaaagtttatataacatttatgaacaaaatgatttgttattcattcgatacccattaaaagataaagtgctgaatgttcatattggtgtcattaatacatttatacgagaattatttggattcgatactgatgaaaatcatattaataaagcagaggagtaatgacgttgagtggaaaaattagtgttaaagctgaaacgattgcacatgttgtaaaagaattggaaagcataagtcaaaagtatgatgaaatagctcaaaactttggaaaaatagcgcaattaaattactacagtagtgaaaaagctgcacattctatggaaaatggctatagtagtgctgcaacagtcattagtggtctcaaaggtccattgagtacactcggtggtggcgtcatgaattcagcacaaaagttctttgaagcagatgaacattggggtacggaatttgccaagctttactataatattgagggataggtgcatgacatgacaaaagatattgaatatctaacagctgattatgacaatgaaaagtcatctatccaaagtgtaatagatgcaatagagggtcaagacttcttagatgtagatacaacaatggatgatgcggtaagcgatgtcagttctttagacgaagatggcgcaatatcattaacaagtagtgtagtaggtccacaaggatctaaattaatggggtattatcaaaatgagttatatgattatgcatctcaattagattcgaaaatgaaagaaattattgacacgccatttatagaagatatagataaagcattcaaaggtataacgaatgttaaattggaaaatatactaattaaaaatggtggtggacatggtagagatacctatggggcttctgggaaaattgcaaagggagatgccaagaaaagtgacagcgatgtttatagcatcgatgaaatattaaaatcggatcaagaatttgtaaaagtaattgatcagcattacaaagaaatgaaaaaagaagataagaaattatctaaaagtgattttgaaaaaatgatgactcagggcgcttcttgtgattacatgacagtagctgaagcggaagagctagaggagcaaaagaaaaaagaagaagctatagagattgcagcactagctggtatggtagttttatcttgtattaatcctgttgctggagcagtagctattggtgcttattccgcttattcagcagcaaatgcagccacaggaaaaaatattgtaactggaagaaagctatctaaagaagaacgaatcatggaaggactttcgcttattccattgccaggtatgggcttcctcaaaggtgctgggaaaagtttaatgaaattaggcttcaaaggcggagaaaaatttgcagttaaaacaggattgcaaaagacaatgcaacaagcagttagtcgtatttcacctaaaatgggaatgatgaaaaacagtgtgttgaatcaatctcgtaactttgctcaaaatactcatgttggacaaatgctgagtaacatgcgtggtcaagcaactcatactgttcaacaaagtagaaattggattggacaacaagcacaaaatgtcaaacgaatagtgaataatggacttgataaagaaatagcacatccatttaaacaacaacttgcaccagcgggaatgggtggtataaaatttgctgaaacaactactttgagaaacatgggtcaaaacataaagcgtgctgttacaccacaaaatcacgtgacacatggtccaaaagatagtatggtgagaagtgaaggcaaacatagtataagtagccatgaaatgaattcatcaaagtatgttgaatcaccaaactacaccaaggttgaattcggagaacactatgcaagacttagacctaagaaactaaaggcgaatattgaatacacaacacctactggtcacatatatcgaaccgatcataaaggtcgcataaaagaagtttatgtagacaatctctctctaaaagatggggatcgtaatagccatgcacaaagaactgtggggggagaggatagattaccagacgatgatggaggtcacttaatcgctagaatgtttggtggttcaaaagacattgataaccttgtggcacaaagtaaatttatcaaccgtccatttaaggagaaaggtcattggtataatcttgagaaagagtggcaagagttcttaaactctgggaaagaggtgaaaaatattaaaatggaagtaaaatatagcggtaatagtcaaagaccgactatatttaaagttgaatatgaaattaatggtgaaagaaatattagaagaatattaaataagtagaggtgccaacatgacatttgaagagaagcttagcaaaatatacaatgaaattgcgaatgagattagcagtatgataccggtagagtgggaaaaagtatatacaatggcttatatagatgatggaggaggtgaagtattctttaattatactaaaccaggtagtgatgacttgaattattacaccaatatacctaaggagtataacatttctgtgcaagtatttgatgatttatggatggatttatatgatttatttgaggagttaagagatttatttaaagaagaagatttagaaccatggacatcatgcgaatttgattttacaagagaaggtgaattaaaagtttcatttgattatattgattggataaattcagaatttggtcaaataggtcgacaaaattactataagtatagaaaatttggaattttaccagaaacggaatatgaaattaataaagttaaagaaatcgagcaatatattaaagagctagaagaataaactatcttaatgtaagactaaacaataaagctttgtttagtctttttagcgtttaagtaaaaagcaatagataccgtaaagttgatgctcatcaaataataatataaagataattttaggtttttaaacttttaatcgaaaagaatctaagtttatagctttaaatacgtaatatgctatttaaaaaataatgtataggagatagatatgactactaaagaaaatattgatactcttcgaaagccaggcgcacaagccttaagtttaatatcattgtttttgatacttttttcatgtttgactttcttttttggtttagattatgaaaggtttccaaattatttaaagataacgacaattatagaattaataattattgtaattagtttacttcaatggattagatttatagatttcgaaaaagaaagtgcacagaaatataaaaaaatatatgctcgatttttagttgttataaatgtgttaactactatcactgtagtatttgcactgtgtaatctttattattttgcagctgtacaaaaccattatgatttatttaattattggttgatgggttcgatttcaatcataattagctatttattattagtaattggcggaatgttcacgttattaaaattacctaaagtaacaaaacgttggggtggtaaaactaaaacacatttcggtttattattaactgcgttgagctcatttatatatattgaaaaaattatcgaatatatattggttcctaatgtcgtagaatctaagtttataattattgtgagcatgttggttatcgctggagcacaatttgtggcatttcaatttattatgcaatacagtagattctatatttttgaattaaacactgaagatgatgactaaacaattttataaattctgtgaagtatacttatatataagataatcaacttcaacgtatatcaccatattattttatactcaatgatgtgaatggatttaagtggattgatattaaagtaaaagttatggaatattgaggtgtgaatatggagttcttattattaattgtcgtagccggactgtattatattatatatttaactgctgtgatgtattctgaaaaaatagtagtattgcctataatcatctatgccattgtgtttgtaataattggtatcacttatatctttataggcgacagctatgatcaattaacaaatttcaatgtgattttgtatatggggagtttgttttatgcatggatggctattagaaatctttggaacagaccactattactaaaatataagaacattacagatagttcaagtggaatagttaataaatctgaatacaattcagttgaaagcttacgtataaatattgaaatagctaagtataaagggattatttctttgatagtagctatagtactaacggtattaatgacattaaagtcaacacctcaaatcactgcagaaacacgtgacttaagtatctcatttttcatactcagcttatttatcattattatatttgcagtttgggatttgtttattagagttagaaaaggagcgtttgcttttgttgtaataaggccaatattatttagttgttggttatttattttgaatatgattttatcaagattattataattgtattacatataggtgtgggtaaatttttatttatgaaatgataaaaaagtatatactattaatatcttttttactataattataaatagttaaataaattgaaagacaaaataatgagtaggagttaatgagatggaaaaccaaaaacaaggcaatggcttaaaaattgcaacatgggtatttattgtattaacagtagttacaccgctatttggtattggaagtattgtttgtagtattaattataaaaaatacgatgctgaaaaaggttcgaagttattgcaaattgcaattatcgtaacaataattgcttttgttttaaatttattagcatatttaggtttaagataagtaaaacgaatttgaagaagcattaagcgacatttgggtgttgtttaatgctttttatttaacggaaataagtgtagagaataaattaatagtttaatcaagagatatttcgaacacataggggcgataacatgactttcgaagaaaaattaagtgaaatgtatagcgagattgcgaataagattagcagcatgataccggtagagtgggaaaaggtatatgcaatggcatatatagatgacggaggaggagaagtgttctactattacacagaacctggaagtaatgaattatactactatactagtgtattaaataaatatgatatatcggaatcggaatttatggattcagtgtatgagttgtataaacaatttcaaaatttaaggaatttatttaaagaagaaggacatgaaccatggacatcatgcgaatttgactttacaagagaaggtgaattaaaagtttcatttgattatattgattggataaattcagaatttggtcaagtaggtcgacaaaattactataagtatagaaaatttggaattttaccagaaacggaatatgaaattaataaagttaaagaaatcgagcaatatgttaaagagcaagaagaagctgaacaatagaggcgataacatgaatttcgaagaaaaattaagtgaaatgtacaataaaattgcaaatgagatcaatgaaatgataccagtagagtgggaaaaggtatatgtaattgcatatgtggacgatggaggtgggcaagttatattttattataccaagcccagaaatgatgagctgtattattattcgagtatcgttgaagattataatgttttagaagaaatctttgatgatttatggatggaactttatagatcatttaaaaaattaagaaatatatttaaagaagaaagtcttgaaccatggacatcatgtgaatttgactttacaaaagaagataaattaaaagtttcatttgattatattgattggaagaatacagaatttgatcaattaggccaagaaaactactataactatagaaaattcggaattataccagaaatggaatatgaaatggaagaggttaaacaaatcgagcaatatattaaagagcaagaagaagctgaacaatagaggcgataacatgattttcgaagaaaaactaaatgaaatgtacaacgagattgcgaataaaattagtagcatgataccagtagaatgggaaaaggtatatacaatggcttatatagatgatggaggaggtgaagtattctttaattatactaaacagcgatgaattgaattattacaccgatatacctaaggagtataacatttctgtgcaagtatttgatgatttatggatggatttatatgatttgtttgaggaattaagaaatttatttaaagaagaaggactagaaccatggacatcatgcgaatttgattttacaagagaaggtaaattaaaagtttcatttgattatattgattggataaattcagaatttggtcaagtaggtcgacaaaattactataagtatagaaaatttggaattttaccagaaacggaatatgaaattaataaagttaaagaaatcgagcaatatattaaagagcaagatgaagctgaactataggggcgataatatgactttcgaagaaaaattaagtgaaatgtatagcgagattgcgaataagattattagcatgataccggtagagtgggaaaaagtatatgcaatggcatatatcgatgaagaatgtggagaagtgttttacaattatactgaaccaagcagtgatgaattattttactatacaagtgtgataaagaagtataatttattgaaatcaagctttatggattcagtatatgagttgcatgatcaatttgaggaactaagagaagtatttatagaagaaggtcttgaaccatggacatcatgcgaatttgattttacaaaagaagataaattaaaagtttcatttgattatattgattggataaatacagagtttgatcaattaggccgtgaaaattattatatgtacaaaaaatttggtgttttaccagaaacggaatatgaaatggaggaggttaaagaaatcgagcaatatattaaagagcaagaagaatagacaatcttaatgtaagattaaacaataaagctttgtttagtctttttagcgtttaagtaaaaaacaatagagaccataaagttgtcatcaaataataatataaagataattttaggcttttatacttttaatcgaaaagaatctaagtacttataactttaaatacttaatatgctattacaaaatcaatgtataggagataggtaaatatgactactaaggaaaatatagacattcttcgaaagccaggtgcacaagccttaagtttagcatcattatttatgatacttttttcatgtctaactttcttttttggtttagattatgaaaggtttccaaattatttaaagataacgacaattatagaattaataattatcataattagtttacttcaatggattagatttatagatttcgaaaaggaaagcgcacagaaatataagaaaatatatgcccgatttttagttattataaatgtgctaactactatcaccgcagtatttgcaacatgtaacctttattattttgttgctgtacaaaatcattatgacctattcaattattggttgatgggtacgatttcaatcataattagttatttgttattagtaattggcggaatgttcacgttattaaaattacctaaagtaacaaaacgttggggtggtaaaactaaaacacatttcggtttattattaaccgcgttgagcgcatttatatatattgaaagaattatcgaatatatattggtgcccaatgtcgtagaatccaagtttgtcataatggtaagtatcattattattgcttgtacacaatttgtggcatttcaatttattatgcaatacagtagattctatatttttgaattaaacactgaagatgatgactaaataattttataaaatactgttggagtatacttaaataagaaaatcaacttcaacgtatatcaccatattattttatactcaatgatgtgaaagaatttgagtggattgatattaatgggatttgattattagaattagaaaaggaacgtttgcttttgttgtaataaatctattatttttcaattgttggttatttattctgaatataattttatcaagattattataattgtattacatataggtgctggtaaattttatttacgaaatggcaaaaaagtatatactattaatatcttttttgctataattataaatagttaaataaatagaaagacaaaataatgagtaggagttttagggctattatttacaaataatataatactgcaaagactcgaaattatttagaattccagttatcgtaacaatagttgcagttattttagttccattagtgtatttaggtttaaaatgagtaatattaatttgaagaagcattaagcgacgtagaggtgttgtttagtgctttttatttaacggaaatgaaaccaatatctattttgaaaatataggggcgataacatgactttcgaagaaaaactaagtgaaatatacaacaagattgcgaatgagattagtgggatgataccagtagaatgggaccaagtatttacgatagcttatgtaaatgatagaggtggagagatcgtttttaattatactaaaccaggtagcgatgaattgaattattacacatatatccctagagagtataatgtctctgaaaaagtattttatgatttgtggacggatttatatagattgtttaagaagttaagaaacgcatttaaagaagaagatttagaaccatggacatcatgtgaatttgactttacaagagatggtaaattgaatgttgtatttgattatgttgattggatgaattcagaatttggtccaatagcaaaagaaaattattatatgtacaaaaagtttggtgttttaccagaaacggaatatgaaattaataaagttaaagaaatcgatcaatatgttaaagagcaagatgaagctgaactatagggggagataacatgactttcgaagagaaactaagtcaaatgtacaataaaattgcaagtgagatcagtggaatgataccagtagaatgggagcaagtatttacaatagcttatgtaactgatcaagctggggaagtcatttttaattatactaaaccaggtagtgatgaattaaattattattcagacatacctaaagattgcaatgtctcaaaagatatttttaagaattcatggtttaaagtttatcgaatgtttgatgagttaagagaaacttttaaagaagaagagcttgaaccatggacatcatgcgaatttgactttacaagagatggcaaattgaatgtatcttttgattatattgattgggtgaattcagaatttggaccaatgggaagagaacattattatatgtataaaaaatttggaatttggcctgaaaaagaatatgccataaattgggttgaaaaaataaaagattatgttaaagagcaagatgaagctgaactataggggagataatatgactttcgaaggaaaactaagtcaaatgtacaacgagattgcgaatgagattagtgggatgataccggtagaatgggagcaagtatttacaatagcttatgtaactgatcaagctggagaagtcatctttaattatactaaaccagatagtgatgaattaaattattattcagacatacctaaagattgcaatgtctcaaaagatatttttaagaattcatggtttaaagtttatcgaatgtttgatgagttaagagaaacttttaaagaagaagggcttgaaccatggacatcatgcgaatttgactttacaagagatggcaaattgaatgtatcttttgattatatagattggataaatacagagtttgatcaattgggccgtcaaaattattatatgtacaaaaaatttggggttataccagaaatggaatatgaaatggaagaagttaaagaaatcgaacaatatattaaagagcaagaagaagctgaacaatagaggtgataacatgactttcgaagagaaaataagcaaattatataatgagattgcgaatgagattagcagtatgataccggtagagtgggaaaaagtatatacaatggcttatatagatgatggaggaggtgaagtattctttaattatactaaaccaggtagtgatgacttgaattattacaccgatatacctaaggagtataacatctctgtgcaagtatttgatgatttatggatggatttatatgatttgtttgaggaattaagagatttatttaaagaagaaggacttgaaccatggacatcatgtgaatttgactttacaagcgaaggtaaattaaaagtttcatttgattatatagattggataaatacagagtttgatcaattaggccgtgaaaattattatatgtataaaaaatttggggttttaccagaaatggaatatgaaatggaagaaattaaagaaatcgatcaatatattaaagagcaagatgaagctgaaatataggggagataacatgactttcgaagaaaagctaagtcaaatgtacaatgaaattgcaaatgaaatcagtggaatgataccagtagaatgggaaaaagtatatacaattgcctacgtagatgatgaaggtggagaggttgtttttaattatactaaaccaggaagtgaagatttgaattattattcagatattcctaaagattgcaatgtctcaaaagatatttttaagaattcatggtttaaagtttatcgaatgtttgatgagttaagagaaacttttaaaaaagaagatttagaaccgtggacatcatgtgaatttgactttacaagaaagggaaatttaaaagtatcatttgattatatagattggattaaattaggttttggcccatcaggaaaggaaaactactatatgtacaaaaaatttggtattttaccagatatggaatatgaaatggaagaaattcgagcagtagagaagtatgttaaagagcaagagtagcagacatgttataaaagactgtgcaaaatcaccctcgttttacatttgattcaaagaagaaggtaaaagataagattatttgcaacttaaaaagtcaattagcttatcggtatccatacatcatggataaatgagttcaactaattaacaaatcacgatataaatttaaaattgtcattaattgaaaaggttattgtagtgtattttataaagttgatgtacatcgacttattttttaaaacttatatcaaaaaaatatgagaaaagtatatactattaaaatgttttttactataattataaatagttaaatatttgggaattaaataaatatataggaggcaatttttagagatacatagcaatgtaaaggtatcaaatagttatttcataatttattatgatgacataattttcagtagatagttgtaaattaacactgaaatagatgtttatattaagaagactttaatatcataattaatcaaaatcttgcgtcaaacatttaaacgaattttaagttgataacaattggcaaaacattgttcaaacatcacaatgataaagcatattatcagtattgtagtgtgtggaaaatgacagccatctaaggagaaaaatgatgaaaagaatattggtagtatttttaatgttagcaattatattggcaggttgttctaataaaggtgaaaagtatcaaaaagatattgataaagtgtacaaagaacagaatcaaatgaataaaattgcctcgaaagtacaaaacactattaaaacagacattaaacaagaagacagtaatacacatgtttataaagatggtaaagtcattgttattggtattcaattatataaagatcgtgaaaaaatgtattatttcgcatatgaaataaaagatggtaaggcagagattaatagagaaatagacccaattaagtatatgaaagaccataaagcagattatgaagatgaaaatgtagaagtggaaaaagattaacataggctttctttaaaacttttaaccagtttcaaaaagtaaatgagctttagcgacaataatttttaaaataaacacgatataaatttaaacatttatatataagaacacaaacgcaagtttgtaaataataataataaaggagtaagacaatggaaaaatcgatcaaaataatgacaataataggaattgttgttcagggtttagcaacggtatttagtttactattgatggttttagcagcatcaggtgtaatgactacagatgtgtcaacaacagttaatggtgaggttgacccagttgatgcagaaacagcagcagcaattttcactgtattattcttatccctattcatatttggaatcatttcaattattttaggtgcaatcggtatgtttaaagcatctaaaaacaaaaaaatgagtggtatattgttgattattggagctgtaataagtggtaacataattacatttgctttatggttaatcagtggtattaaactacttactaataacaagcctaaagatgaaataagcgacttatcataaacatcgtatattgaaatttcaagatttcttaagtaattaaataaagtgctctcttagaagtagattttcagtcaataactgcttttaagagagcattttgtatttgataatgctcatagcatcggataaaaatcattgacgaactttaaaaaaatacgttagacaatgcacttctaaatattaaaggcatcgactaacgcattgttcaaatatagttaattatttttataaaattgatgatgatcattcaagtaagcatagaataaacctataatgagtccgcctccaatatagttaccgataaaagccgcagcgatattcgaaatagctggtatgaagtgcaatgtatcaacttgataaattaaaccacccataaataagcaactgttgtaaacgacgtgttcataacccataaaggcgaatatggtaacaccgaacatcatgacaaacatttttgcgagtacatcgtcaatttgcatggcaataactaatgaaatattgataaagaaattggcgaagatcgctttcattaatatacttacaaaaccagtagacaacgttttatgctctataactgctgataactgatttaacatatctggcgtcattacatttgaaaaacgcatgaaactaaataaaatagcagcacctaaaatatttcctgcaaagcataataaaaatattttcaatactctagttggtttaattactttataatacaggcctacagtaaagtacatgaagttactggttagtagttcggagtttgtaaataaaatgagtactaacgcaaagctgaatgtaatggcactggccatattcacaatgcctggcggtaaatctggttcgtgtgttgctttaactgataatacgaagaccgtaataatcccgataataaatcctgccatcatcgcgcgtaataaataacgttttaaataaacgctttgtaatatatcttttgttcttatcgtttcgactacgttatttacccagtcgtccccataaaaaatcttatcccatttaatatgtttctccttcacaatgacatcctcacttttcatttgttaatcagagtatactatgaattgccttatttgtgaataatttcacaaaattaattttaaaaactaatatttttgaataacagctaggattttttaacaaatcatttattttaaaataatcaatagacagacggtatcactgaaaagtcatgaatttcatataaaaaagcctagtaacgatgggtcaatcattactaggcagtgagcatttattaagttgtcgcttgtttcggacggcgtataaatacatcgattatgaaaccgataatagcaaagagcatgaatggtacaagccaagctaaatcgatatctgctaaaggtaacatcataaacgatttcaaaataacaccgtgtaataagttgaaactatttagtatttgtaaaattgaaataatcaatgtaataacagttgcgagtcgataggcccaactgaatctgaatgtgctaaacatgttagcaaatgatatgagtacaagtgcaatcgacacgggatatattaaagtcaataatgggacagcaatttttaaaatcatttctaaaccaagtgttgtaaataagaaccctatgatagagaaaataagtgcgaatattttataagaaaacttaggtacgtgtttcttagtaaatgtggcgcaagcattgacgagtcctatacatgttgttaggcatgcaaggataaccgtcattccaaatacgaggttaccgaacgaaccaaataatcgtaatgagttgtacgtcaatatatctgtaccatctttaaagtttcctggagctgttgatgccccaacgtatgcaagtgcaaagtaaatcattccaagtaatatggctgcaataagacctgaaaagcagacatattttaaaattttcatgcgatctgtgaggcctttaaacttatagccattgacaatgactacggaaaaagctaacgcagcaacaagatccattgtaaaatagccttccaaacttcctgaaatgaaaggatgtgttatatatttatccttaggtgcacttagtgcagattcagggttgaaaatgacagcaatacttaatagagcgaccattaatagtaataacggtgttaataatttacctaaattatcaacgattttcgatggatttaaactaatccagtaaacgatggcaaaaaagattgctgcgaatataattaaagtccattggttatgcacaggtaaaatgtgtcttgtaccaatttcgtacgcgacatttgcagcacgtggaataccgtaaaatgctccgatagacatgtaaatcacgacagcaaaaataaacccgaaccatggatgtatacgattgcctacactttcaacaccttcatcataaaatgcaacaacaataacagtaataaaggggagtaatatgcctgtaagggcaaagcctagcataccaatccacatattttgacccgctgtatggccaagcatgggcgggaatattaaatttccggctccaaaaaatagtgaaaataacatgaggcccgaaataataacttgttttttcaatgtaatttccttcctaaaactagatattcataataatttaaaaaatctgaaaaataaaaacgttcttactttatctttaaatgacaatactatgattctattattttataaaaaagattgcaataataacgtcttgctattattggataatgacaattaaagtgtcgtttttatgaattaaaataggtgaaagtaagttggaaatacgttggagcgttgtgatttttatgagaaattgtatgagtgaggactgctatttataaaaggtaaactatggatgagtttatggttgttccaataggtaaataagagatagcacactgtacacataatgatacgtggatgagtgaatatgtctgataggaaggcctagtcactcaaatgaatttaagtttattacgtgataaatcacaaatctctctcatgtgataggtctcccattaaatcatgcttatatgaaatgttcacatatttgttagcttttcaagaaataatattaaatatcttttcatagtatagcaatattaaataaatgcatttataattttaactgtattttaaatattaatcatgaggtgataagatgaataaaatttcaaagtatattgcaatagcatcattatcggtagcggttacagtttcagcaccacaaacgacaaattctacagcgtttgccaaaagttctgctgaagttcaacaaacgcaacaagcttctataccagcatcacaaaaggcgaatcttggtaatcaaaatattatggcagtggcttggtatcaaaattcagctgaagcaaaagcattatatttacaaggttataacagtgcaaagacacagttagataaagagattaaaaagaataaaggtaaacataagttagctattgctttggatttagatgaaacagttttagataattctccatatcaaggctatgcatcaatacataataaacctttcccagaaggttggcatgaatgggtacaagctgctaaagctaaacctgtctatggcgcaaaagaattcttgaaatatgctgacaaaaaaggtgtcgatatctactatatttctgatagagataaagaaaaagatttaaaggcaacacaaaagaacttaaaacaacaaggtatccctcaagctaagaagagtcatattttactaaaaggtaaagatgataagagtaaagaatcacgcagacaaatggttcaaaaggatcataaacttgtcatgctatttggagataatttattagactttacagatccaaaagaagctacagctgaatctcgtgaagcattaattgaaaaacataaagacgatttcggtaagaaatatatcattttccctaacccaatgtatggtagttgggaagctacgatttacaacaataactataaagcaagtgacaaagcaaaagataaattacgtaaaaatgctattaagcaattcgatcctaaaacaggcgaagttaaataatatatgaattggacgtctacatgtacttaaaggtatatgtaggcgtttttaaattgatccttaattttaaatgtaccgtacaaaaataatagacaattaattgcattttccataaatttgcttttaatataaaaagttcgggtataatgaaggataagtgtatgtataacattacagagcgcaacacgacgtacgtgcatctaagaatataaacaatgtttaaatcatagtagtagggagagaaatgcatgtttttagcttggaatgaaatacggcgcaacaaattgaagtttggactaattattggtgtgttaacgatgattagttacttgctatttttattatctggattggcgaatggtcttatcaatatgaataaagaaggcattgataagtggcaagcagatgccattgttctaaataaagatgccaatcaaactgtgcaacaatctgtttttaacaagaaagatattgaaaataaatacaagaagcaagctactttgaagcaaacaggggaaattgtgtctaatggccatcaaaaagacaatgttttagtgttcggtgttgaaaagtcatcatttttagttccgagtttaatagaagggcataaagcgactaaagataatgaagtgttagctgatgaaacgcttaaaaataaaggatttaaaattggtgacacattatcactatctcaatcagatgaaaaattgcatatcgtaggttttacagaaagtgcaaaatataatgcgtcatcagtcattttcacgaatgacgctaccattgccaagatcaatcctagattgactggagataaaattaatgcagttgttgtacgtgatacaaattggaaagacaaaaaattaaaccaagagcttgaagcggtaagtattaatgactttattgaaaatttaccaggttataaaccacagaacttaacattaaactttatgatttcattcttatttgtcatttcagctacagttataggcattttcctatatgtcatgacattacaaaagacgagtttatttggcatattaaaagctcaaggatttacgaatggctatttggcgaatgtggtaatttcgcagacggtcatattagcactatttggtacggcatttggcttactgttaacaggcgttacaggtgcatttttacctgatgcagtacctgtcaaattcgatgtactaacattgctcgtatttgcaattgtgttaatgattgtctctgtattaggaagtttattctccattttaacaattagaaaaatagatccgttaaaggcgattgggtaggaggtgtagcaaatgttgaaatttgaaaatgtaacaaagtcatttaaagatgggaatcgtaacattgaagcggttaaagatacaaattttgagataaataaaggtgatattatagcattggttggaccttctggctctggtaaaagtacatttctaactatggcaggtgctttacaaacaccgacatctgggcacattttaatcaataaccaagatattacgacaatgaagcaaaaagcattggcaaaagttagaatgtctgaaataggttttattttacaagctacaaaccttgtaccatttttaacggtaaagcaacaatttacattattgaaaaagaaaaataagaatgttatgtctaatgaagactatcagcaacttatgtcacaattaggtctaacttcattgcttaataagttaccttcagaaatttcaggtggtcagaaacaacgtgtggcgatagccaaagcgttatatacgaatccgtcgattattttagcggatgaacctaccgcggcgttagatactgaaaatgcgattgaagtcattaaaattctacgtgatcaagccaaacaaagaaagaaagcatgtattattgttacacatgatgaacgacttaaagcatattgtgatcgttcatatcatatgaaagatggcgtccttaatcttgaaaatgaaacagtagaatagttttattaagccggtacatcatgtgccggtatttttatgtttatgtattatttgaataaactttcacattcaattaataataattattatcgaaaatcagaaatattccgtgaaatataatattttttgtagtaaaatggcctctaagtattcaatatttaaatatggggattgaatataaaattatcgtaatgggggtcaatggttatggatttattgataggtactttatttttatttttggtcttagtgatttttacattatttacatataaagcgcctaatggtatgcgtgccatgggagcattagctaatgcagcaatcgcaacatttttagtggaagcatttaataaatatgttggtggcgaagtattcggtattaaatttttagaagagctaggagacgctgcgggaggtctaggtggtgtcgctgccgctggattaacagcattagctatcggtgtgtcaccagtatatgcattagttatagcagccgcgtgcggtggtatggatttattaccaggtttctttgcgggttatatgattggatatgtgatgaaatatacagagaaatatgtgccggatggtgtcgacttaattggatcgattgtcatcttagcgccattagctcgtcttattgcagtattattaacgccagtagtgaatagtacattgattcgaattggtgatattatccaaagtagtacgaatacgaatccaattatcatgggtatcattttaggtggtattattacggttgtcggcacagcgccattgagttcaatggcattgacagcattattaggtttaacgggtgtacctatggctattggtgccatggcagcatttagttcggcatttatgaatgggacgctattccatcgcttaaaattaggtgatcgtaagtctacgattgcagtaagtattgaacctttatcacaagcagatattgtatcagccaatccaattccaatctatattacaaatttctttggtggtgcgattgctggtttaattattgctatgtcaggtttaattaacgatgcgacaggtacagctacaccgattgcaggatttttagttatgtttggatttaatcatccgacgacaattgtgatttatggtgtagtaatggcgattgtaggtgcgcttgcaggttatcttggttcaattgtatttaaaaaatatccaattgttactaagcaagacatgattaatcgaggtgcagtagacgcatagcatcatcatattgaatagtaaaaacaaataaaacatagtaacgtgattcagtcgatgtaacagtcgataatgagtcacgtttttttatagaaaaatacaagacataaaaatgtcataatttattgtcgacaaatatcatactgtataaacatttatcattttctcaagtaccttttacacgatggaatgaacttactttttacgaaattatgcgtattttataaacaaatatcattgatataacggtaaatgtaagcgtttacaacagaaataacagcatgctacgatatttttgtaaattcactgattcaagtattttaagtcaatatgaggagggatgttatgagcgattctgagaaagaaattttaaaaagaattaaagataatccgtttatttcacaacgtgaacttgctgaggcaattggattatctagacccagcgtagcaaacattatttcaggattaatacaaaaggaatatgttatgggaaaggcatatgttttaaatgaagattatcctattgtttgtattggcgcagcgaatgtagatcgtaagttttatgtgcataaaaatttagttgcagaaacatcaaatcctgtaacgtcaacacgctctattggtggcgtagcaagaaatattgctgagaacttaggtaggcttggcgaaacggtcgcttttttatctgctagtggacaagatagtgaatgggaaatgattaaacgattgtccacaccatttatgaatttggatcatgttcaacaatttgaaaatgcgagtacaggttcatatacagctttaattagtaaagaaggcgacatgacatatggcttagcagatatggaagtgtttgactacattacgcctgaatttttaattaagcgttcacacttattgaaaaaggctaagtgcattattgtagatttgaatttaggcaaagaggcattaaacttcttatgtgcctataccacgaaacatcaaatcaaattagttatcaccacggtttcttccccaaaaatgaaaaatatgcctgattcattacatgctattgattggattatcacgaataaagatgaaacagaaacatacttaaatttaaaaatagaatctactgatgatttaaaaatagctgctaaacgctggaatgatttaggtgttaaaaatgttattgtgacaaatggcgtgaaagaactcatttatcgaagtggtgaggaagaaatcattaagtcagttatgccatcaaatagtgtgaaagatgttacaggtgcaggcgattcattctgtgctgcagtagtgtatagctggttaaatgggatgtctactgaagatatattaattgctggtatggttaacgcaaagaaaacgatagaaacgaaatatacagttaggcaaaacctagatcaacagcaactttatcacgatatggaggattataaaaatggcaaatttacaaaagtatattgagtattctcgagaagttcagcaagcacgggagaacaatcaaccgattgtagcattagaatcaacaattatttcgcatggtatgccgtacccacaaaatgttgaaatggcaacaacagtagagcaaattatcaggaataatggtgccattccagcaaccatagccattatagatggcaaaattaaaattggtttagaaagcgaagatttagaaatactggcaactagtaaagacgttgctaaagtatctagaagggatttagcagaagttattgcgatgaagtgtgttggtgctactactgtagcgacgacgatgatatgtgctgcaatggctggtattcaattttttgttacaggaggtattgggggcgtccataaaggtgcagaacatacgatggacatttcagcagacttagaagaactgtctaaaacaaatgtcactgttatctgtgcaggtgccaaatcaattttagacttacctaagacgatggagtatttagaaacaaaaggcgttccagttattggatatcaaacgaatgaattgccagcattcttcactcgcgaaagcggtgttaagttaacaagttcggttgaaacgccagaacgacttgctgacattcatttaacaaaacagcagttaaatcttgaaggtggcattgttgttgctaatccaattccatatgagcatgccttatcaaaagcatatattgaggcaatcataaatgaagctgttgttgaagcggaaaatcaaggtattaaaggtaaggacgccacaccgttcttgttagggaaaattgtagaaaaaacgaatggtaaaagtttagcagcaaatataaaacttgttgaaaacaatgcggcgttgggtgctaaaattgctgtcgctgttaataaattattgtaggtgatgatacatgaatattttattcgctatcacagggatagcatttgcactatttgttgcgtttttattcagttttgatcgtaaaaaaatagacttcaaaaagacgttaataatgatatttattcaagtgttgatcgtgttatttatgatgaacacaacgattggtttgacaattttaactgcactaggttcattttttgaagggctaataaatattagtaaagcaggcataaattttgtttttggagatatacaaaataaaaatggctttacgttctttttaaacgtattactgccattagtttttatttctgtattaataggcatctttaattatattaaggtattaccatttattatcaaatatgtaggtatcgctattaataaaataactagaatggggcgcttagaaagttattttgctatttcaacagcaatgtttgggcaaccagaagtatatttaacaataaaagatattattccaagattatctagagcgaaattatatacaattgcgacgtctggtatgagtgctgttagtatggcaatgctaggttcatatatgcagatgattgaacccaagttcgtagttacagcagtaatgttaaatatttttagtgcgcttatcatcgccagtgtaatcaatccctataaatctgatgatactgatgttgaaattgataacttaacgaaatccacagaaactaaaacattgaatggaaaaacaggaaaacctaagaaagttgcctttttccaaatgattggtgatagtgcgatggatgggtttaaaatcgctgttgtagtagccgtaatgttgttagcatttatttcattaatggaagcaattaatatcatgtttggtagtgttggtttgaactttaaacagcttattggctatgtgtttgcaccaatcgcattcttaatggggattccatggagcgaagctgttccagctggctctttaatggcgactaaattaattacaaatgagtttgtagcaatgcttgattttaaaaatgtcctgggtgatgtatcagctcgaacacaaggtatcatttcagtttacttagtaagcttcgctaattttggtacggttggtatcatcgtaggttcaattaaaggcattagtgataaacaaggagaaaaagttgcatcctttgcaatgaggttgctacttggttcaactctagcttcaatcatttcaggatcaatcattggcttagtattgtaaatgaatcgaagtacctaaattaaattcatggcaaagctaaaccccgtcaccaagttggcgcaacagcgcatcataacttagtgacggggttttatcataacaatctactttttcgtagccgtttttgaaatgtatgttgatggtttatctttttcaaaaattgttaatcccgttatatcttttttatgttttgaagggacaatgaagctaagtatataagcaaagacaaaagcaactgtaaatgaaatggtagatacatagaaaggtgagttacctttgccaacaccattatagacataagcaaagatgatacccaatattaatccacaaataacaccgaatgtattcgtacgtttagtgaaaataccaactgcaaatacaccagccaatggaacgccgaataatccagtcacaaacaagaataaatcccataagtcatttgaattagaagcaattaagtatagtgacattccaaaaccgaaaatacctgcaatgataataatgaaacgtgcaaagttaacttcgtgtcgctcgctaccttttccgaagaagcgttgcttaatgtcgattgaaatacaagcagatatagaatttaaactagatgaaatggtagactgtgcagcggcgaaaatggctgcaataagtaatcctgctacaaatggtggcatctcagtcaaaatgaaatatggcactacagatgatgtattgaagccttttggtaaaacagcttcatgtgtataaaatgaatacagcattgtacccataccataaaataagggtgctgaaattaaagctaggataccatttgtccataacgatttatttgtttcttttaaactatcagaagcttgataacgctgcacgacgtcttgactcgctgtgtattgatacaagttgttgaaaatatttcctaggaaaataattggaatggcagctgccgcagtatttagtttccaattgtctgcactaattaattttttgtgctcaatcgcatctgcaaagacagtgccgaaaccgcctttaatgttcacaacacctagaataataataactaaagcgccgcctaataaaatgacgccttgaatgaaatcactccaaaccacaccttcgaaaccacctaaaaatgtatataaaatacatagtaaaccaacgagtgatgcaacgatataagggttcatgtctgatacagatgtgattgctaatgttggtaagtagataacaattgcaacacgccctaaatggtaaacgacaaataataatgagccaatgacacgtatgctagggccaaatctagcttctaaatattcatatgcagatgttacctttaactttttaaagaaagggacatagaaataaataagtaatggaataattgcgacgatagcaatgttaccagcgatatatgaccaatctgttaaaaatgctttctctggtgtcgacataaatgtaatcgcacttaacgtagtagcataaattgaaaagccaactacccaagatggcaagcgaccacttgcggtaaagaaactattggtactttggctcgcgcgcttggtaaaataaacgccaatgaacaacatagctagtagataaatgataacggcaacccagtttagtgtgccaaatccaacttctttcatgggcaacatcccctttacaatgtattgattctttgatgtctataaatcgtattttgcaatgagttgatctaatgtttgtcgatgtgcttcgttaaaaggtttgaaaggtcttttcggtaatcctgcatcaatgccacgatgacgtaatatttctttcaatgttggataaatccccattgataacactgtttcgataatgtcgtttgaatcatgttgcagttggtaagcttcttgaatttgaccttgtcgtgctaagtcgaagatttttcttgcacggcgaccattaacgttatatgtagaaccaattgcaccatctacgccagaaatcgtagcttgaactaacatttcatcaaagccagataagattaatttgtctgggaatgcttttctaatacgttcgagtaggaagaagtttggcgctgtatatttaacaccaacaattttttcatgattaaatagctcgctgaattgttcaatagaaatattcacacctgttaaatctggtattgcataaataatcatattgttctgagttgcttcgataatatcgaaatagtaatctctaatttcttcaaaagtaaatggatagtagaatggtgttacggcagaaagtgcatcataaccgagttctgtggcatattttccaagttcaatggcttcatttaaatctaacgaacctacttgagcaatcaatttcactttatccccaactgcctctttggcaaccttgaaaacttgcttcttctgctctgtatttaataaaaagttttcgcctgagctaccatttacataaagaccgtctaattcttcagtttcaatggcattttgagcaatttgtttaagtccttgttcatttacttgaccattttcatcaaaaggaacgagtaacgctgcatataaaccttttaaatctttgttcattatgaagtccctccaaaaatcatttgataatatagtttacagctataattgtaaacgctatcataaaatgtaacaatatctttttgaaaattgtagtcatatttatgtataattaatgaaaatgtttttcaaaatcaatagaaatggagtgagtaaggtgtattacatcgcaatcgatattggaggcactcaaattaaatcggcagttattgataagcaattgaatatgtttgactatcaacaaatatcaacgccggacaacaaaagtgagcttattactgacaaagtatatgagattgtaacaggatatatgaagcaatatcagttgatccaacctgtcataggtatttcatcagcaggcgttgttgatgaacaaaaaggcgaaattgtatacgcagggccaaccattccgaattataaaggtactaattttaagcgattattaaaatcactgtctccttatgtcaaagtaaaaaatgatgtaaacgctgcattactaggcgaattgaaattacatcaatatcaagcagaacggatcttttgtatgacgcttggtacaggcattgggggtgcgtacaagaataatcaaggtcatattgataatggtgagcttcataaggcaaatgaagttgggtatttattgtatcgtccaactgaaaatacaacgtttgagcaacgtgctgcaacgagtgcattgaaaaagcgcatgattgccggaggatttacgagaagcacacatgtgccagtattgtttgaagcagctgaagaaggtgatgatattgcaaaacaaatattgaatgagtgggcagaagatgtagcagaagggattgcccaaatacaggtcatgtatgatccagggcttatattaattgggggcggtatatctgaacaaggagataatctcattaaatatatcgagccgaaagttgcacactatttaccaaaagactatgtttatgcaccaatacaaacgactaagagtaaaaatgatgcagcattatatggctgtttgcaatgatagttgaaagaaggagtcattctaaaatagaatttgaaaccgttacgagagatgagagctgttgttagttccacacatcacactctatctaggaccaatctaaactatatcaaccaacagtgtgccacgggcaaattaaattgaagaagctgagatattaaaattttagaaaatgtaaaaaaatatttggtattgaaattaaaaaagcacctagcaactcgttgggacaatcacgatgattgtctacagttgcaggtggatttgaatatactactagttatttgttgtctaggataatagatttagtatgttgataagtttgactcagattcgtattttctaataaatgataactcacgatatcgattaaaaagagtgtcgcaatttgtgtgttgataaattgatggtcggtattacgcgattgatccgttgttaaaagtactaaatctgcacaatctgtaagtttactaccttcaaaatttgtgatggcaacgacatatgcaccatgagatttggcgacttccgctgcagaaattaattccgaagtattaccactatttgacatagcaataaacatatccgaatgagatagtagggatgccgatattttcattaaatgtgaatcggtagtaacattaccttttagccccatacgaatcatacgataataaaattcagtcgctgataaaccagagctacctagtccagcaaagagtatatgtcgacttgattgaagtttgtcgataaaggtttggataatgtcgttatcaataaattcaccagtttgttgaatgatttgttgatgatatttatgaattctttgaataattgggctattttcaataactgtctctgtcatttcttgttgaatattaaattttaaatcttggaaattctcataatccagcttatgactaaagcgtgtcatcgttgctggtgatgtaccaatcgcatgggctaaggagttaatcgttgaaaaggcatcgctataaccattttgtcttatataattgacgatgcgtttatcagtttttgtaaataaatgttgataacgttgaacacgattctcaaatttcattgtgtcaccccttcatcttaatgattactattatatatgaaaaatattttcaagatagtaaaaagcattgataaaaattatcttaatgatatattgtaaatgactttacgtgaaaaaacgacttatggagtgaggaataatgttaccacatggattaatagtatcttgtcaggcactaccagatgaaccattgcattcatcttttattatgtcgaaaatggcattagctgcgtatgaaggtggtgctgttggtattcgcgcaaatactaaggaagacattttagcaattaaagaaacggtagatttaccagttattggcattgtgaaacgtgactatgatcactcagatgttttcattactgcaacgtcaaaagaagttgatgaactgatagaaagccaatgtgaagtcattgcattggatgcaacgttacagcaacgtccgaaagaaacgttagacgaattagtatcatatattagaacacatgcaccgaacgttgaaatcatggctgatatcgcgaccgttgaagaagctaaaaatgccgcacgacttggctttgattatattggcacgacgttacatggctatactagttatacgcaaggacaattactttatcaaaatgacttccaatttttaaaagatgtactacaaagtgttgatgcaaaagttattgcggaaggtaatgtcattacaccggatatgtataaacgtgtgatggacttaggcgttcattgttcagtcgttggtggtgcgataacacgaccaaaagaaattacgaaacgttttgttcaaattatggaagattaaatgataacgataaaaaaacgagatgaccatcattaattaaaggcacctaattatcttaggtggctgaatgaatgtaatgggttcatctcgttttgtttgtttatgatagtgattttattttcaactttatccaaaaataagtaaagcgacggggatggtgattaatagcgacaacgccacgcgtaaaaaccaaatgatgatgagtttccagacaggtattttaatttcagttgctagtatacatggcactaatgctgagaaaaagataatggctgatacgcttactacaccgacgacaaatttagtactcattgcagctttagttactaacaaagatggtagaaacatctctacaatagaaatcgctgacgcttttgctagtaaagcctgatcagcaattgggaaaatataaataaatggatagaagatatagccaagccaatcaatgaatggtgtatagttcgctacaatcagtcctaaaaaaccaatcgataatatagaaggtaaaataccaacagtcatttctaaaccgtctttcaaattgtcccaaacgttcttcacgagagatggtgttaatgcattttgtttcatcgcctctgcatatgcagttttcagtctgcttccttcaatagcaacttcttgttctccttcttgtccgttataatattctgttgattcattgctgattggcggtagccatgcagtaattgcagtcacgacaaatgtgatgactaaagttatccaaaagtataaattccaatgcggcattaatcctaaagttttagcaacgataatcataaaagttgctgaaactgttgaaaagccagtcgcaataatcgtggcttctcgtttgttgtacatcccttgcttatagacacgattagtaatcaataatcctaaggaataactgccgacaaacgaagccactgcatcgacagcggattttcctggtgttttaaaaataggtctcataataggctccatataaacaccgacaaattctaataagccatagcccactaataaagaaagcgcaattgcacctactggaattaagatacttaatggcatcattaatttttcaaacaaaaacggaccatagttagctttaaatagtattgatggaccgattttaaatacatacattataccgatcattgcacctgcaactttaaataatgtaatgaccaagtttgtgattgaagtcataaaagtacgtctcactattggtaacgctgtaccaattaaaatcataatcagtgcaacatagggcataagtggacctatgattgagcgaatggctagatgaacatgatcgacgaaaatagtgttgttaccattaatcgtaaaaggaataaagaaacatagtatgcccactaaactatagacaaaaaaacgccatgcacttggttgttgtgcattagaatgatattgattcattaaagcaacccctttgtttaaatgaatacacaaaactgtatgatgcatcttccccttaatgagatgaatcattattttaatttagaaaaatctgaaaacttactataattgtatagtttgaattattttcataccaatacaaattaactaattatatatagattgaaactatattacttaataaaatatttatcttaaatgttgttgtgttgattcaacaccacaactaaaagtgtttataaattatttggaaatacacatatttgtaaatgattagtatcgatttaatatcgtattattaaatttttattaattttgtagtcttaatcaaaaaataatatatgtcatgttatattgaaggtgcagttgtttttcattctcaagagggggtcaaaaaaatacttttgaggtgattatatgttaagaggacaagaagaaagaaagtatagtattagaaagtattcaataggcgtggtgtcagtgttagcggctacaatgtttgttgtgtcatcacatgaagcacaagcctcggaaaaaacatcaactaatgcagcggcacaaaaagaaacactaaatcaaccgggagaacaagggaatgcgataacgtcacatcaaatgcagtcaggaaagcaattagacgatatgcataaagagaatggtaaaagtggaacagtgacagaaggtaaagatacgcttcaatcatcgaagcatcaatcaacacaaaatagtaaaacaatcagaatgcaaaatgataatcaagtaaagcaagattctgaacgacaaggttctaaacagtcacaccaaaataatgcgactaataatactgaacgtcaaaatgatcaggttcaaaatacccatcatgctgaacgtaatggatcacaatcgacaacgtcacaatcgaatgatgttgataaatcacaaccatccattccggcacaaaaggtaatacccaatcatgataaagcagcaccaacttcaactacacccccgtctaatgataaaactgcacctaaatcaacaaaagcacaagatgcaaccacggacaaacatccaaatcaacaagatacacatcaacctgcgcatcaaatcatagatgcaaagcaagatgatactgttcgccaaagtgaacagaaaccacaagttggcgatttaagtaaacatatcgatggtcaaaattccccagagaaaccgacagataaaaatactgataataaacaactaatcaaagatgcgcttcaagcgcctaaaacacgttcgactacaaatgcagcagcagatgctaaaaaggttcgaccacttaaagcgaatcaagtacaaccacttaacaaatatccagttgtttttgtacatggatttttaggattagtaggcgataatgcacctgctttatatccaaattattggggtggaaataaatttaaagttatcgaagaattgagaaagcaaggctataatgtacatcaagcaagtgtaagtgcatttggtagtaactatgatcgcgctgtagaactttattattacattaaaggtggtcgcgtagattatggcgcagcacatgcagctaaatacggacatgagcgctatggtaagacttataaaggaatcatgcctaattgggaacctggtaaaaaggtacatcttgtagggcatagtatgggtggtcaaacaattcgtttaatggaagagtttttaagaaatggtaacaaagaagaaattgcctatcataaagcgcatggtggagaaatatcaccattattcactggtggtcataacaatatggttgcatcaatcacaacattagcaacaccacataatggttcacaagcagctgataagtttggaaatacagaagctgttagaaaaatcatgttcgctttaaatcgatttatgggtaacaagtattcgaatatcgatttaggattaacgcaatggggctttaaacaattaccaaatgagagttacattgactatataaaacgcgttagtaaaagcaaaatttggacatcagacgacaatgctgcctatgatttaacgttagatggctctgcaaaattgaacaacatgacaagtatgaatcctaatattacgtatacgacttatacaggtgtatcatctcatactggtccattaggttatgaaaatcctgatttaggtacatttttcttaatggctacaacgagtagaattattggtcatgatgcaagagaagaatggcgtaaaaatgatggtgtcgtaccagtgatttcgtcattacatccgtccaatcaaccatttgttaatgttacgaatgatgaacctgccacacgcagaggtatctggcaagttaaaccaatcatacaaggatgggatcatgtcgattttatcggtgtggacttcctggatttcaaacgtaaaggtgcagaacttgccaacttctatacaggtattataaatgacttgttgcgtgttgaagcgactgaaagtaaaggaacacaattgaaagcaagttaaattcatcttctgaatttaatatgctatgtaaatcgtgctgttatcacggcacatcagatataagtagcatcacagtgttgaatttaaaaatagtaaagtgaaataaagcgcctgtctcattagcgaaaactaaagggacaggcgtatctgtttatgagcttaataaattgtatgaataatatggttgatcgaataactgtttatcatgatgataaattgagttttttaaaataatgatatattacatcattgttatagcgtttaagaaatcaacaactttacgataaatagtgattgcttcgtcattaggtctacgatcaaaatcatgctcgtttttattcacgcgttcaaatgttgaatgtggaacatgattcatgatatgttcgctttcctcaacgggaacatcataatcgccattacaatgcgcaatgaaaacaggtggaagtgttttaagttcatctggtgcaatattatattttgaattagtataatcagcaatgttaatcatatttatccatttacctgtgccacgtgcataaacgtagattaaaaaacgttgtgcgatttgatcttgaacaaccggtgttggtgaagtgagttgtgcaatcattgtttcgtttacgctttgagctatttttgcgtaataactattagttgttttaaaaggttcagtgttgatgcgactataaccataaaaatcaataacaccatcaatatctctgtctcgtgcaattaatagacttaaatatgcacctgatgatctgccaaaggtaaaaatagggcaattagaatattgtgattgaatcgcatcgaatgatgcgtagacatcctcaataatgcaatcgagacttacttctggtaataaacgataacttagttgaattaaatcgtaatgttccgtaaggatatcgatatactgtggggataaatcgttagctttaccgaacattaatccaccaccgtggatgtagacaatagcgccttttgttggttgattttttgctttaataattgtgtaaggtaatgcaaatgcatctttagtaattactttatctttaatttcagtcacgatttaataggctccttatttttgatattgatgtcattataacactgtcttaaatttccatgaaaaatagtcttaagacgatgagtcatgataattctgttccaattgacgtaaagcgtcacgggtatgcttctttagaccttccccataatccatcattttaacaatatctttaaaagcagcatgtggaatggctaaatcttctaaatctgccatagaaaattcaagattgatatcatgtggtcgctgttcagcaagtttatgcacaaagtcaggttctgtgacaaaaggcgaagacatgccgaccatatctgcatgttgtaaagcatctaaagcagactctggagaattaatcccgccacttgcaattaaagggatacgacctgctaaatgttcatagacaatttggttaactggtcgaccgaaatgatcacctggtgtacgagacgtattttgataaatatgtcgaccccagctagcgattgctaagtattggatgtttgaaacgtccatgacccaattgattaattggttgaactcgtcaatggtatatcctaaatcactgcctctggtttcttctggcgttgctcgaaatcctaaaataaaattgtcaggtgcttctttatcaatcacttcttgtaccgcacgcataacttctaaacataatcttgcacgattttttaatgagtcggcaccgtaatggtctgtacgtttattcgaaaaagttgagaaaaatgtttgaatcagcaaacgttgtgcaatcgaaatttccacaccatcaaaacctgctttaatcgcgcgtaatgtagcatcgcgatactgctgaatgatgctattgattttctcatgagacatggcgataacatcgtgttcaatcggtgaatgcaatgtcatagggcttggtccatacacctttccaaaatttaaaatggcttgatttgaaaaacgaccagcatgcgctagctggataatagcgaggctaccatgttgtttcatcgtagatgccatgttagttaatccagggatacaagcatcatgatcaatattaaagccatattcaaacaattgaccataaggttcaatgtaagcagcgccggtgacttgcattccagctgaattagagcgacgtgcagcataagccaagtcttcttttgtaatatagccttcttttgttgatgtgtttacggtcattggtgataatacaaagcgattcgaaattttgatgccattaggtaagtggattgattgtaaaagtggtttgtatcggtacatactatgattccttttctattcaatattgttttcaaagtaccatggaaagaatgaataatcaatgatgaacagtcttgatagaatagaattggtacatggaaagtatttttaaaattaaactaatgaatggcatttgtaggtctgaaaatatgaatatgaaaaagaaaaataaaggcgaaaagatataaaagttaattgaaaaacgttatcatatacgtgggtatatgaagagggaatggtattaagaacgctaaaatgttatgtcggtttgacatgacaggataagtttggagatgacggattggttaaattaagcgtattagactatgccttaatagatgaaggtaaggatgcacaaaaggcattgcaagattcagtgacacttgcaaaattagcagatcgacttggctttaagcgaatttggtttacggaacatcataatgtaccagcgtttgcgtgtagtagtccagaacttttgatgatgcatacattggcgcagacaaatcacatacgagttggctctggtggtgtgatgctgccgcactatcgaccttataaaattgctgagcattttagaatgatggcagcgttatatccaaatcgtattgatttaggtattggtaataatccaggtactactatggtaaagcaagctttagatggaataaatcctacatatgatagttacgatgaatcgatttcgttattacgtgattatcttacaataaaggataaaccaagtgcgcatacgttaggtgtccaaccacacattgatcattttccagaaatgtggttattaagtagtagcgcaacatctgccaaaatagctgccgaactaggtatagggctttctgttggaacatttttgctaccagatataaatgcgatacatgcagcgaaggataacattgatatttacaaaaaacatttccaagcatcaacgattaaaatggacgcaaaggtgatggcatctgtatttgtcattgtagctgataacgaagcggaagtagcagcattacaacatgccttagatgtttggttattaggtaaattacaatttgcagaatttgaagattttccttcagtagacacagcacaaaagtataagcttaatgatcgagacaaagagatgattcaagcacatcaagcacgcatcattgcaggtacacaagaaaaggttaaagcacaattagatgatttcattgctacgtttgaagttgatgaggtgttagtagcaccgcttattccaggtattgaacagcgttgtaaaacattaaaattactcgcggaaatttatttgtagcattttaaatagaagagaaaggatgaagataagatgaaaaagttagccaattatttatgggtagaaaaagtaggagatttgtatgtgtttagtatgacacctgaattgcaagatgatattgggacagtaggttatgttgaattcgtaagtccagatgaagttaaagtggatgatgaaattgtgagtatcgaagcatcgaaaacggtcattgatgtgcaaacgccattgtcaggaacgattattgagcgaaatacaaaagcggaagaagaaccgacaattttaaactctgaaaaaccagaagaaaattggttgttcaaattggatgatgtcgataaagaagcattcctagcattaccggaggcttaaatggaaacgttaaaatcaaataaagcgagacttgaatatttaatcaatgatatgcatcgagagagaaatgacaatgacgtattggtaatgccatcttcatttgaagatttgtgggaattatatcgaggcttagcaaatgtcagaccggcattacctgtaagtgatgaatatttagctgtacaagatgctatgttaagtgatttgaatcgtcaacatgttacggatttgaaggatttgaagccgataaaaggtgacaatatctttgtttggcaaggtgatatcacgacgttaaaaatcgatgctattgttaatgctgcaaatagtcgttttctaggatgtatgcaagctaatcatgactgcattgataatattattcatacaaaagcgggtgttcaagttcgacttgattgtgcagagatcattcgacaacaagggcgcaatgaaggtgtaggtaaagccaaaataacacgtggatataatttgtcagcaaagtatataattcatacggttggtccgcaaatacgtcgattgcctgtttcaaagatgaatcaggacttgttagctaaatgttatcttagctgtcttaaattggctgatcaacatagtttaaatcatgtcgctttttgctgtatatctacaggtgtatttgcttttcctcaagatgaagcagcagaaattgctgttcgaacagtagaaagctatctcaaagaaacaaattcaacattgaaagtcgtgttcaatgtatttacagataaggatttacaactgtataaggaggcatttaaccgtgatgcagagtagtaagtggaatgcaatgtctctgttaatggatgacaagacaaagcaggctgaagtattgcgtactgcgattgatgaagcagatgcgatagtgattggaattggtgcaggcatgtctgcatctgacggatttacatatgtaggagagcgttttacggaaaatttcccagattttattgaaaaatatcgcttctttgatatgttgcaagcgagtttacatccttatggcagttggcaagagtattgggcatttgagagtcgttttattacattaaactatttagatcaacctgtaggtcagtcttacctcgctttaaaatccttggtggaaggtaaacagtaccacattataactacgaatgcagataatgctttcgatgtagctgattatgatatgactcatgtatttcatatacaaggggagtatatactgcaacagtgtagtcagcattgtcatgctcaaacgtatcgcaatgatgatttaattcgtaaaatggttgttgcgcaacaagatatgcttataccttgggagatgattccaagatgtccaaaatgtgatgccccaatggaagtgaataaacgtaaagcggaagttgggatggttgaagatgctgaatttcatgcgcaactacatcgttataatgcttttctagagcaacatcaagatgataaagtgttgtatttggaaattggaattggttatactacaccacaatttgtgaagcatccttttcagcgtatgacacgtaaaaatgaaaatgccctttatatgacgatgaataaaaaggcatatcgcattccgaattcaattcaagaacgtaccatacatttaactgaggatatctcaacattgattacagcagcactccggaacgacagcacaacgaaaaataacaacattggagagacagaagatgtacttaatagaaccgattagaaatggagaatatattactgatggtgcgattgcactcgctatgcaagtttatgttaaccagcatatctttttagatgaagatattttattcccttattattgtgatccaaaagtggaaattggacgttttcaaaatactgctatagaagtgaatcaagattatatagataaacacagtattcaagtagttcgccgagatactggtggtggcgctgtgtatgttgataaaggtgccgttaatatgtgttgtattttagaacaagacacttcaatttatggtgattttcaacgattttatcaaccagctataaaggcgttgcatacattaggtgcaacagatgtggtacaaagcggtagaaatgatttaacattgaatggtaaaaaagtgtcaggcgccgcaatgacattaatgaataatcgtatttatggcggttattcgctattacttgatgttaattatgaagcaatggataaagtgttaaagcctaatcgcaaaaagattgcatcgaaagggattaaatctgtgcgcgcacgtgttggtcatcttagagaagcactggatgaaaagtatcgtgatataaccattgaagaatttaaaaatttaatggtgacgcagattttgggaatcgatgacattaaagaggcgaaacgatatgaattaacggatgcagattgggaagcgattgatgaattagctgataaaaagtataaaaattgggattggaattatggcaagtcacccaaatatgaatacaatcgaagtgaaagattatcttcaggtacggtagacataacaatttctgttgaacaaaatcgtatcgcagattgtcgtatttatggggatttctttggacaaggtgatataaaagatgtggaagaagcattacaaggaacaaaaatgacaagagaagatttaacgcatcagttaaagcaattagacatcgtttattattttagcaatgttacggtagaagcattagtggatatgattttaagttaatattgttattttatgtatgctgaatcattggaagtgtttgcttgctcttgaaaaggtgacaatagtgtttggtgaaggttgaacatatgagtggaaattattgcctttaactattcaaagtatgatatatatatggtttttgtttctaaatgattgggtatttgaaaatagatgagtttaatattttaaggaatataatgatgtttacttttataattcatatagaatattaagcaatataagtctgttgatatatacaaaatataatgactgctataatgagtaatcaatagacacaaagaggagattatgtgatgaataataaagtattagcaaccggtggtacagggtttgttggcatgcgaattatttcacgattattagaacaaggttatgacgtacaaacgacgatacgtgatttaagtaaagctgataaagtaattaaaacaatgcaagacaatggcatttccacagagcgattaatgtttgtcgaagcggatttatcacaagatgaacattgggatgaagcaatgaaagattgcaagtatgtcttgagtgtagcatctccggtgtttttcggtaaaacagacgatgcagaagtgatggcgaagcctgcaattgaaggtatacaacgtattttaagagctgcagaacatgcgggtgttaaacgtgtggtaatgactgcaaactttggtgcagttggttttagtaataaagataaaaattcaatcacaaatgaaagtcattggacaaatgaagatgaaccaggcttatcagtatatgaaaaatcaaaattgttagctgaaaaggcagcgtgggattttgttgagaatgaaaatacaacagtagaatttgccacaatcaatccagttgcaatttttgggccatcattagatgcacacgtttcaggaagctttcatttattagaaaatttattgaatggttcaatgaaacgtgtaccgcaaattccgttaaatgttgttgatgtgagagacgtagctgaactgcacattttggcaatgacaaatgaacaagctaatggcaagcgatttattgcgacggctgatggacaaattaatttgttggaaattgcaaaattaattaaagaaaagagacctgaaatagctcaaaaagtttctactaaaaaattaccagactttattttgagtctaggtgctaaatttaatcatcaagctaaagaaggtaaacttttattagatatgaaccgcaatgtaagtaacgaacgtgcaaaaacattacttggttgggaaccgattgcgacacaagaagaagcaattttagcagctgtcgatagtatggctaagtatcatttaatataatacaaaacaccgtccataagtaagtggctttcctcttgataaaaggggcattcactcaatatgtgacggtgttttatatttctacgttaacactattgctgttctttttgacggccttttaataaaattgttgtcgcacctacgataataataaatagaatcgcaccaaataatcccatatattttactgcgttaccgaacacgataccgacagctaaaaagtctgtatctgagaatgttgttgcagcaccacctaattcgcctaaaaatggcaagaataataatggtaaaaacgtgattaggataccatttagagcggcgccagcaatagcacctttaataccgcctcttgcattaccgaatacagcagccgttgcacctaagaagaagtgtgcaactacgccaggtaaaatgacgacgccaccaaataagaataagataaacataccgatgacacctgtaataaagctgacaaagaatccaattaatactgcattttgtgcataagggaacacaatagggcagtctaatgcaggtttagaatttggtacaagcttttcagaaattcctttaaatgctgggacgatttcagctaagattaaacgaacgcccgttaaaataataaatacaccagcagcaaatgtcacaccttgaattaatgaaaagacaataaagttttgaccatcactaatagattcgtgtacataactaacgcccgcaaataagcatgcgatgaagtaaagtaatgccatcgtaatcgagatactaattgtactttctcgtaagaaacttaagccttttggaaatttaatctcttccgttgatttagacttacctttgaataattgacctacagcacctgcggcaaagtaactgattgagccaaaatgacctaaagctacttggtcattccctgtaatttttcgcatcgtaggttggagtaatgcaggtaatactgccatgattaatcctaatacgagtgcgccgataacaatcgttagccagcctttaatatgactgactgttaaaatgattgctaaaaacgcagccatgtaaaatgtatgatgacctgttaaaaagatatattttaaattagtgaagcgggcaattaaaatattaacaatcatgccacagaccatgatgagtgcagctgttgttccaaaatcttttaaggctagtgagacgatagcttcgttgttaggtacgataccttgcacaccaaatgcgtgttggaatattttgccgaatggttcaagagatcgaacgacgacatcagcacctgcacttaaaattaagaagcctaatatcgttttaatggttcctgaagtgatcgttgcggcaggttttttctgaacgattaaacctataaaggcaatcagtgcaacaagaatggctggttgacttaaaatatcgactataaaattaaggattgcttgcataggtcgtacctcctttaaatcatgttaagttgttgtaatttttctgagagcttttgttgtaattcagctttatctaaaatattatcaagaactaagacatcccctagacgttcggcattttcagctaaatctctaccacaaataaacaagtcagccatctctggacttgctgtcataatgtcactatgttcaacttcgatatcagatggtgcattaagttgcctaagtgcttcttgtgcgttcatttctaccataaaactacttcctaaaccgtggccacatactactaaaattttcatattaatcatgctcctttaaaatgtttttaatgtcttgtgcatttgttgcagttaatagttgctggactgtttggttatcgcccagtacggttgctaaattttgtaatacagataagtgtgaatgattgtcgatggcactcaatacaaaaatgagagatgcgtagtgatcttcatcacaaaatgccacatgttgattcaactttaatagacttaaaccaacttgatgtacgtcattgttcggtcttgcatgtgcaattgcaatttcaggtgcgataacgatataaggtccaagttcattaacgctatcaatcattgcttgaacatagccttgttcaataatttgttcttgtagtaatggctgagaagctatagttatagcttcagtccaatcatttacttgttcttttacaatgatgcgtgttgttgacaaaatgtctaatgacacgttattaagcctcctttgtcatagttaaagcaatgtgttgtttaattttaaaaatattcccatctaagaaatcttgtcgatataagtcgttgcttaagcattcgcttaactgtcccaatgcctttaaatgtgcattggggtggtccgttgctaatgtaattacaaggtgaacgggatcgttagctttactaccaaagataatcccttcagtgaaatatgttagtgcgaaacctacaccattctgtacataatcagtaccagcgtgaataagtgcaatatgtggactaatgaccatatatgacccgaattgttcaaattgttttaaaattgcagctgtataatttgaatagacaatgccatcattgattaaaggttgcacagccactgcaattgcggattcaattgataatggttgtttatttataatgatgcgatgttcaggcaataaatctgcgagtgacttgccatcagttgccattttcatgactcgttgttctcttgagtcattgataatttgattcaatttttgacgagattgttgattgataaatggatcgacatgaataactggtacagctgatatttcacaaggtactgttgaaatgacataatcaatgttatcttgcaataatcgactttcttccaattgataaatggaataggcatcccaaatgtgaaactcaggatacaggtgatttagttttgattttaaaagttgtgacgtgcctataccagaaccacatagtaagacaaccttaatcattgattgtttatgtgttgcaacacgctctatacttgatgcgaagtgaattgtaatgtatgttaattcatcttcgttgaagcgaatagcagcatcttgttcaattggactaatatgcttgctaacggcttcaatgatttgaggatagcgacgcataacttcttgcctcaaaggattaggttgtagcatatcgtatttaatacgatgtatagctggtttgatatgtgtgatcagactggtatgtaacttgttgtcttttgacatatcaatgcctaattcttggctaacacaagtgatcaattcatgtatattttgcgataaatcatggtattcaaaggtaattgaagatgctgtatgttcagtcattttagagcctagtaaatgtaacgtgataaagataatttcagactctggaaatgtgacattacaactgcgttctaagttttctatcatttttgaagcaatagcatactgattagtatgtcgccatttatcaatttcattgataggtatatcgaacgaaaaattttcatttaaacgctgaatggcaatgagtatatgatagattaagccatcgatagccgactgaactaaatgataattttcactatttaatgtcttaataatggcacggcgaaccaatgcgattgattctgaattaaagatatccgcctctataaaaggtgcagcttgtttcatatattgatgtataaagtgtgcatacgctttacgataatgatcttcctcaccaataatattgaatcctttattgtggacataatttaactttaaatggtattgatctagttgggcttgaatcattttaatatcatctgcaattgtccgacgcgaaacattaacatcttgcgcaagttgctttgttgaaacaggatcggttgtttcgaataactttaaagcgatatgtgtgagtcgttcatcttttgaaaaatgaatttgatttgttagattgtgctctaattcatttaatagtgtcgcgtgagctgttgttactttgatgcctgcagctttattacggctgacttggtaatgataagtttcagcatattgctcaatatatgctatatcatattgaatggtacgaggtgatacaccaagttgattagcaatggtattgattggaataaacgtttgctcatgaattaaaagatacaaaatttcgatttgtctataacttaacaacgtaatatcctcctatttgtaattgtaagcgatttcttaaaaacgtagatatgcaatctctttcatattttaatccgaaaaattgcatatcaaaatgtttatggcgcaagattttataggaacttttaaaataaattagatattcatgttgtcaatttaaaaatgtcgcagtatatttagttagacatctaacgaaatggtggtgcaataaatggaattcacttattcgtatttatttagaatgattagtcatgagatgaaacaaaaggctgatcaaaagttagagcaatttgatattacaaatgagcaaggtcatacgttaggttatctttatgcacatcaacaagatggactgacacaaaatgatattgctaaagcattacaacgaacaggtccaactgtcagtaatttattaaggaaccttgaacgtaaaaagctgatctatcgctatgtcgatgcacaagatacgagaagaaagaatatagggctgactacctctgggattaaactcgtagaagcattcacttcgatatttgatgaaatggaacaaacactcgtatcgcagttatctgaagaagaaaatgaacaaatgaaagcaaacttaactaaaatgttatctagtttacaataaatgataagtgtgactggtagaaatcagtcactttgtctttaatattatagttagatatctaattgttagtaagctaattattggaaaagacaaggagtattgaacaatgaaagacgaacaattatattattttgagaaatcgccagtatttaaagcgatgatgcatttctcattgccaatgatgatagggactttattaagcgttatttatggcatattaaatatttactttataggatttttagaagatagccacatgatttctgctatctctctaacactgccagtatttgctatcttaatggggttaggtaatttatttggcgttggtgcaggaacttatatttcacgtttattaggtgcgaaagactatagtaagagtaaatttgtaagtagtttctctatttatggtggtattgcactaggacttatcgtgattttagttactttaccattcagtgatcaaatcgcagcaattttaggggcgagaggtgaaacgttagctttaacaagtaattatttgaaagtaatgtttttaagtgcaccttttgtaattttgttcttcatattagaacaatttgcacgtgcaattggggcaccaatggtttctatgattggtatgttagctagtgtaggcttaaatattattttagatccaattttaatttttggttttgatttaaacgttgttggtgcagctttgggtactgcaatcagtaatgttgctgctgctctgttctttatcatttattttatgaaaaatagtgacgttgtgtcagttaatattaaacttgcgaaacctaataaagaaatgctttctgaaatctttaaaatcggtattcctgcatttttaatgagtatcttaatgggattcacaggattagttttaaatttatttttagcacattatggaaacttcgcgattgcaagttatggtatctcatttagacttgtgcaatttccagaacttattatcatgggattatgtgaaggtgttgtaccactaattgcatataactttatggcaaataaaggccgtatgaaagacgttatcaaagcagttatcatgtctatcggcgttatctttgttgtatgtatgagtgctgtatttacaattggacatcatatggtcggactatttactactgatcaagccattgttgagatggcgacatttattttgaaagtaacaatggcatcattattattaaatggtataggtttcttgtttactggtatgcttcaagcgactgggcaaggtcgtggtgctacaattatggccattttacaaggtgcaattatcattccagtattatttattatgaatgctttgtttggactaacaggtgtcatttggtcattattaattgctgagtcactttgtgctttagcagcaatgttaatcgtctatttattacgtgatcgtttgacagttgatacatctgaattaatagaaggttaaatatttcgtccacttctggctgagtatatttcggtcggaagtgtatttttcgaaaaaaataaatatatgatacgattatgaaaaaataaagtgagattggcatatgtgtaaatctaaaatactgttgaaaaatatttttagtgaagaatcagaagttaaagatttaactgaagaaaaatataatcaagattacgaagcattaacatttagctttaaagaggaaacatatcaaagtaggttagctaagaaaacaccgactaaatcgggatatttcgtgacatgttggacaaaagacgaagataattataatcggccatacaaaattgaagagtttgctgattacctgattgttgctgttatcgatgatgaattaaatggctactttctatttcctagggaattattggtagaaaaaggtatcttagcttcatctaagtatcaagggaaaatggcttttagagtttatcctaagtggtgtaatcaattgaataaaacagcagggcaaacacaaaagtggcaatgtaaatatttttttgaatactaataaaaagtcatatggttgaacttataagagatgaatatatcatctttcgataagataaccatatgactttattttttatcatttaatgatgaacggtttcttgtcctactttattccaagtgaggataaagctcaacattgcaaacacactaattgctgttaataaaataaaaccgacatcccatccgaatttatcaactacagcacctaagacgatgttggccattacagcaccaaacagataaccaaataatcctgttaatccagctgctgtgccagctgcttttttaggtacataatctaatgcttgtaaaccaattaacataactggtccatatattaagaaaccaatggcaattaatgagacattgtctaaccaagcattgcctggaggatttaaccaataaattaatacaaatactgtgacacctaacataaagaagaaacctgcaggtccacgacgacctttgaataatttatcagaaatgtaaccacataataatgtaccaggaattccagcccattcgtataagaagtatgcccaacctgatgcttttaagtcgaaatgtttttcttcacttaagtagactggcgcccaatcaagtacaccataacgcacgaaataaacaaatatatttgcaaaggcaattgcccatacccatttattgttcagtacatatttaaataaaatttcttttgtagttaattctgtttctaatgttttcttatcgcttgtagcaaagtcatttttataaatttcgattggaggtaaaccttgagattgaggtgtgtctctaatcaatacgtatgaaattgcggcaatgataagtgctaagagtgcagggtaaatgaatacaccttcgaaaccttttaaataaccaaagttgataaatgcagttgttgtaataccccaagcagcaataggtgccataatacctccaccaacattatgcgcaacgttccaaagggcagtcttacttccgcgttcacttacactaaaccagtgaacgagaacacggcctgaaggtggccagcccataccttgaaaccatccatttaagaataataggacaaacataataccgatacctgatgtgaagaacggtacaaatcccattaacaaattgacgatagcagtgagtgctaatccaagaactaagaatatccgagcattgctccgatcacttacagtacccataaagaacttactaaatccatatgcgatggaaacagcagaaagtgcaaaacctagttccgcttttgtaaaaccttgctcttgcaatgccggcatcgctaacgaaaagtttttacgtaataaatagtacccagcataaccgatgaaaataccaagaaatacttggagacgtaatcgtttataggtatcatctatctgattttctggcaaaggcttaatatgctttgcaggtttaagaaaattcataaaatcctccttaatatgtatttatatgcattttgtgcgataaacttatattagacatgtatgaaagcgttgtcaatatgcttttgtgaaatcttgcatatttagttattgaagtattttataaacatttagaaaaaataaattgctacacataaatttataattatgcaattattatgtcgttatacatactagctgtgtatctacgaatgagtacaaacatatttttatttgcaaggggtaaatggcatataactatcttttttatgtaagctggtataaaatttatactaataggagggatagtatgaatatagtagggcatcatcacatatccatgtatacaaaagatgcaaaacgtaataaggatttttacacaaatgtccttggattacgattagttgaaaagtcggttaatcaagacaatccttcaatgtatcatttgttttatggggacgaagtaggtacagccggaacaattttaagcttttttgaaattcccaatgcgggtcataagcagccaggtactgaaacgatttatcgattttcattattagtaccaaatcaagcggcacttcattattttgaaaaacgtcttgagaataatggtattaagtctgaacgtttgtactatcttggacaagaaggtgttgtctttaaagatgaagacgacttagaaatcatattgcttgttaatgatagttttgaagtaccacatcaatggcaacataacgcttatagtgaaatacctcaagcatatcaaattttaggaatagggccagtcgaattaagagttagaaatgcagcgcgtacggtagaatttttggaaaatgtcttaggttatcgcaaaagagataataaatcattcgatgtgctgacattagcaccacaaggtttatattcggattttgtagttattgagcaacagggacaacgtgaaagacctggacgaggttatatccatcatattgcagttaatacaccacaaatgagtgacttagatgcaatttacaagaaattacaacaacaaccacaaagtaattcaggtataattgatcgctatttctttaaatcattatactatcgccataattcaattatgtatgaatttgcgactgaagcgcctggatttactattgatacacctgttgaacaattaggaagtcaattgaacttgcctgactttttagaagcagaacgtgaacaaattgaaagtaagttacacgaaatataaaggagaatgtttaatggccaaattagaaatgaataaaaatacgcctcttgagtttggtttgtattccttaggtgatcatttattgaatccattgaaaggtgaaaaagttagttatgagcaacgtattaatgaaattattgaagcaagtaaattagcagatgaagcaggtattgatgtttttgcagttggtgaaagtcatcaggagcattttacaacacaggcacatacggttgtgttaggtgcaattgcccaagcgacaaagcatattaaagtttcaagttcttcaacgattattagtgcaacagatcctgtaagagtatttgaagacttcgcgacattagatttgatttctcatggtagagccgaaattgtagctggcagagcatcaagaacaggtatttttgacttgtttggctatgatttaaaagactatgatgaattgtttgaagaaaaattaggtttacttttagagttaaataaaactgagcgtattacttggtctggaaaatatcgtccagaacttagaaatatgaaaatattcccaagaccaatcgataatatattgccaatatggcgtgctgttggtggtccacctgcaagtgctattaaagcgggaaaacaaggtgtgccaatgatgattacaacccttggtggcccagcaatgaactttaaaggttctatagatgcttatcgtcaagcggcaactgaagcaggtttcgatgcttcgcctaagtctttaccagtaagtacagcgagtctgttttatacagctgaaacaactcaggatgctatgagagaattttatccacatttgaatacagggatgtcatttattcgtggtgttggttatccgaaacagcaatttgctaattcgtcagattatcgagaagcgctaatggttggaagcccgcaacaaattattgaaaagatattgtatcaacacgagttgtatggtcatcaacgttttatggcacagcttgattttggcggtgtgccatttgaaaatgttatgaagaatattgagttaattggcaacgacattataccggcgattaaaaagcatttatcaaaataggaggggcgtcatcatgaatattgtattattgtcaggttccacagtaggttctaaaacgagaattgctatggatgatttaaaaaatgaactagaagtcatcaatgagggacatcaaatagagttgatggatttacgagaacttgaattagaatttagcgttggaaagaattatctagatactacaggagatgtatataaattaacgacgtcgttaatgcaggctgatgtgatttttattggttttccaatttttcaagcttccatccctggtgctttgaaaaatgtgtttgatctacttccagtcaatgcgtttcgtgacaaggtaataggacttgtagcgacagcaggttctagtaaacattatttaattcctgaaatgcatttaaaaccaatattgagttacatgaaagcacatacgatgcaaacgtatgtatttattgaagagaaagatttttcaaatcaacaaattgtcaatgatgatgttgtatttcggttaaaagcgttggcacaatccacaatgcgaactgccaaagtacaacaacaagtgtttgaagaagaaaacaaccaatacgacttttaaagtataaaaataagacgctcggcacactaaatttgtaagtgtttgagcgtcttttcatattaactatatagccaatgaacgacgataaaggcaagtgatgacaagcatattgaggtaataatgattgtcataagcggtttaagtgcgcgatttttaagatctttaaatgcaacatttaaccctaaagcaaccatggccattaataagcaaattgttgatacagtatttaaaatatttagcaatgctgacggaatagttacatatgtattcactaaggccataatgacaaatccaattaaaaagtatggaatgcttattcgacccttgctagatgattctgatgaacggaaacgcataattaaaataagtacgatggttaatggaatcagtaagaatactctaccaagtttaccaagaagtgcaattttaagtgcatcactaccaccaaagccaccagctaagacaacgtgtgcaatttcatgaagactaacaccagaccaagcgccataaacatttgtcgtcattgaaaagatagcgtagatagctgtatatataagtgaaaatatcgtaccaatcaatgcgatgataccgatactaatagctgtatccttttcacgtgatttgaatattggagcgactgcggcaatagcagcagcaccacaaacgcctgtgccgacacctagtaataatgcgatgtttttgtcaccatgcaacagtttgttgacaaagagcatcattacaatactgaaaataacgacacctacatcgatggctaatagtttactaccttgaccgataatatcgaatatattgagtttaagtccatataggatgattgcaaatcttaataaatatttagatgaaaacgtaatacctgagctatattgttcaggatatcctctaaagtgacgatatagaatagcgattaatatcgcgatagttaatgcgccaaccttatctaggattggcaatttagctgctaaaaagctaaataatgcgactataaatgttagtgatagcccaatcataaaatgcttatttttcaatgatgccatgagcagtgcctcctttaatagcattttagcactgttttgtcgtatttttaaatataaatttggaatgaataataaagtagtgattaaattaagttgtgtgataggaaacttggacatcaatcaaagtaataggcactacaacgcttattggcggggccccaacaaagaagctgacgaaaagtcagcttacaataatgtgcaagttggggatgggccccaacatagagaaattgggtccgtaatttctacagacaatgcaagttggcggggccccaacatagagaatttcgaaaagaaattctacaagcaatgcaagttggcggggccccaacatagagaatttcgaaaagaaattctacaagcaatgcaagttggggaaggacaacaaatttaagatacaatgcgtaacattaatatgttattataatgataatttactgaattatatgaaaaatgaatgaggatgtgatggtatgtttggaatgaaagtgaatgaacaaataacattaaaaattttagaagctcatgacacagaagcgcttttcaatttagtcaatcgttcaagaaattcacttagggaatggttaccttgggtagatgcaactgagcaaccatcagatacgcgtgcatttattaaaagaggacttttgcaatttgctgatggtaatggatttcagtgtggcatttggtatgaaggaacgctagttggtgtcatcggtttacatgaaattaatcacatgcacagaaaaacttcattagggtactatttagataaagaatttgagggtcatgggattatgacacaagcagttgaggcattgataaagtattgtttcgaagagcttgacttaaaccgaattgagattagtgccgcagttaataatgaaaaaagccgggctattcctgaaaggctgggatttactagagaaggtatgttacgtgacaatgaattactaaatggtatttattcatcgagttacatctatagtttattaaaatcagaatacgaccaaaaatgacaaattagacttacaaaagagtgatgacatttaaaatggcagcgctcttttatttaatttttaaaaataaaaggttgttgacagtattattttataacaatataatgattttgataattattatcaactagatgatgtttatgggaggatgctttaaaacagccgttttaagtgtaatgtattattttagcgtgtagggaatgcgaaaataatatttataagaacacatctatggggataatagaatttctataatgaggtgtcaaaatgaaaaagttaacaacgctattattagcatcaacgttattaattgctgcatgtgggaacgacgatagtaagaaggatgattcaaagacatcgaaaaaagatgatggtgttaaagcagaattaaaacaagcaacaaaagcatatgataaatatactgatgaacagttaaatgaatttttaaaaggtacagaaaaatttgttaaagcgattgaaaataatgatatggcccaagcaaaagcgttatatccaaaagttcgtatgtattatgaacgctctgaaccagttgcagaagcatttggagatttagatcctaaaattgatgcacgtcttgcagatatgaaagaagagaaaaaggaaaaagaatggtcaggatatcataagattgaaaaagcattatacgaagataagaaaattgatgatgtgactaaaaaagatgcacaacaattattgaaagatgcaaaagaattgcatgccaaagctgatacattagatatcataccaaaattaatgttacaaggttctgttgacctattaaatgaagttgcaacttctaaaatcacaggtgaagaagaaatttattcacatacagatttatatgattttaaagcgaacgttgaaggcgcacaaaaaatttatgacttatttaaacctattttagagaaaaaagataaaaaattaagtgatgatatccaaatgaacttcgataaagtgaatcaattattggataaatataaagataacaacggcggttatgagtcatttgaaaaagtatcgaagaaagaccgtaaagcatttgcggatgctgttaatgcattaggagagccactaagtaaaatggctgtgattactgaatgacaaattatgaacaagttaacgatagtacgcaattttcaagacgtacatttttgaaaatgttaggtattggcggtgccggtgttgcaattggcgcaagtggtgttggtagcatgtggtctttcaaatcaatgttcaatacaccagaagatccggaaaaagatgcgtatgaattttatggtaaagtgcaaccaggcattaccacacccacgcaaaaaacatgcaatttcgttgcgttagatttgaagtcaaaagatagagatgcaattaaggcaatgtttaaaaagtggacggttatggctgatcgtatgatggatggtgatacagttggcaagccgagtaacaatcctttaatgccaccagtagataccggtgaatcgataggattaggtgcaagcaagttaacgattacctttgggattagtaagtctttgatgaagaaaattgggttatctagtaaaattcccgatgcctttaaagatttaccgcattttccgaatgatcagttaatagacgattacagcgatggtgatattatgattcaagcatgctcaaatgattcgcaagtatcctttcatgcggttcataatttagttcgtccatttcgagatattgttaaggtacgttgggcgcaatctggttttatctctgctaaaggtaaggaaacacctagaaatttaatggcatttaaagatggaacaattaatcctaggaagaataatcaacttaaagattatgtgtttattgatgacggatgggcgaaacatggaacttattgcgttgtcagacgtattcaaatacacattgaaacgtgggatcgtactgcgctggaagaacaagaggctacatttggtcggaaacgacatagtggtgcaccgttaacaggtgggaaagagtttgatgaaattgacttaaaagcgaaagatagtcatggcgagtatattattgataaagatgcccatacgaggctagcgaaagaagcaaatacgtcaattttacgtagagcctttaattatgtggatggtacggatgaccgcacaggtaacttcgaaacaggcttactttttattgcttttcaaaaagcgacaaaacaatttatcgatatacaaaataatttaggtagtaatgataaattaaatgaatatattacacatagaggttctgcttcatttttagtattaccaggtgttagtaagggaggataccttggtgaaacattatttgactaaatttgtagcaatgctaataactgctgctatggtgtgtagctttgggttactgaaaagtcaggcagcagaacaacaaagtattagtgatgtatatagtgtgataacggatgcgaaatctgcactttctaataattcgatatcgaatgacaataagcagaaagcaattgagcaagtggtaagtgcagttaagaaattatcgcttgaagataatagtgaaagtaatgctgtcaaatcagatgtgagaaagcttgaagatgcaaaagcgaatgataatcaaaaagatacactttcgcaattaacgaagtcattaattgcttatgaagagaaattggctagtaaagatgcgggttctaaaattaaactattgcaacagcaagtcgatgctaaagatgctgcgatgacaaaagcgattaaagataaaaataaagcggaattagaatctttgaacaatagtttgaatcagatttggacaagtaatgaaacagtgattcgcaattatgacgcaaatcaatatggacaaattgaagtcgcattattacaacttagaattgcaattcataagtcaccattagatacggcaaaagtgtcacatgcttggacaacttttaaatcaaatattgatcatgtcgataaaaaaagtaatacgtctgcaaatgatcaataccatgtatcacaattaaatgatgcgttagagaaggcgattaaagctatcgacgacaatcaattgtcggatgctgatgctgcgcttacacattttatagaaacttggccgtatgttgaaggtcaaattcaaactaaagacggtgctttgtatacgaaaattgaagataaaataccatattatcaaagtgtattagacgaacataataaagcacatgtgaaagatggtttagtagatttaaataaccaaattaaagaggttgttggccatagttatagcttcgtcgatgtgatgattatctttttacgtgaagggctagaagtgttgttaattgtaatgacattgactaccatgacgcgtaatgtaaaagataagaaagggactgcaagtgtgattggtggtgcaattgccggacttgtactgagtattatcttagcaattacgtttgtagaaactttagggaatagtggcattcttcgtgaaagtatggaagcgggattaggtatcgttgcggtcatattaatgtttatcgttggtgtttggatgcacaaacgttcaaatgcaaaacgttggaatgacatgattaaaaatatgtatgctaatgcgattagtaatggtaatttggtattgttagcgacgattggtttaatatctgtgttgcgtgaaggtgtcgaggttatcattttctatatggggatgataggtgagctagcgaccaaagattttattattggtattgctttagctatcgttattttaatcatctttgcattattatttagatttatagttaaattaatacctattttctatatatttagagtgttgtcgatctttatttttattatgggattcaaaatgcttggcgtaagtattcaaaagttacaattattaggtgcgatgccaagacatgttattgaaggattcccaacgattaactggttgggcttttatccaagttatgaaccattgatagcacaaggtgcttatattatggtagttgctatcttaatctttaaatttaaaaaataaaaaacaggccgagtgcctgtttttttgttgctatattggaaatattcggtattgcagtataacgataatcacagcattgattcgtataaggttaatgtgttggcggtttgcctcggcatgtgaacttaacgatgaacatactgaactcaaagagcaatatgagtggcaatgtgagtaatatatttaatgttaaatcgggtggtgcaatgatacttgctaatacaaagcaagcgaaataaatatatttacgataatgtttcaatgatgtggtatctataagaccgaattttgcaagacccataaataatattggtaattgaaatagaagaccaaatgtgaataaccaacgtatgagttcaatcaaatatgctttaaagccaatgacaggcgaaatgtttaaagttaatgataattttaacgcgaattgaatgatcattggaaagccaacataaaatgcaaaagcgacgccagcacagaataataacacgctgaaaaaactatatttataaataaattgacgttcattattatgtaatccaggtgcaatgaatgcccacaattgataaaacatgactggtgaaatgaaacaaaacgcgatgaaaaatataatcatcacgtatatttgtatcatttctgtgaatgaaaatgcatgtaaggacacatgtgcacgggtaatatacgttatgaatggtgtcatccaccaaaatgatgaaacatatacgacgatgaccgtaatgacgaacgacaataaaatttttactaaccgatggcgtagttcgctaaagtgaaccagtaaggtgtggtcagtgctattgctctcgctgttgtttcgattccttactgggtgtatcgtgagactctttatctaaatcttctgttgcagatttaaattcttttaaagtagaaccgatggcacggccaaattgtggtaattttttcggaccaaaaataattaaagcgataatgctaatgacgacaagacttgttgggcctgtgatgcctaaaataaaagtgttagttatcatgataatcaacctcactcataagtagtatatagtatttactttataccgaacgataatgattatcaataaaattttatgaaataattaaaatgttgctataaatatagtttattgagggattaattctgaaataacagcttggtcttgcaagtcgatataagtacaagtgcccgcttgaatatcgatatgccatttataaatgccagcttcagccatttcatcacaaaatgtttcaaaatctgtttgcccttgttgatgtctagttaagacgtcttgaactattgttttgtttgatttttgagcaacaggatgattactttttacagatgacgtaacgatatcatcttctgattgatgtacgtatgttgcagtgccatcttgaatgttgacgatattgtaagtcatccccatatctttaaaagctttgaatagttttggaaagtcaacaccagtaaattgttgatgtgcttgttgaattgcagataatgtaaatgccataatagtctcctttgaatggtttgatttagtgaaaatgcgtgcatcatactaaaattagaatgctgttaattatgcaggaaggtgtaacgaaagtaaacaattatgacttgtaggcgttgaggtgtttgtttcaaaatgtcatacataggtggataatcatattttttggtgtagatttgacaaatatagttgtcaaaaagacgcatatcatttacagtgtaattaaggagttgatgcgatgtgcgtaatcgattgaaagaattacgagcacgagatggcttaaaccaaacgcaacttgctaaacaagcgggcgtttcaagacaaaccatatcgctaattgagcgaaacaattttatgccatcagtattaacggcaataaaaattgctcgcattttcaatgaaacggtggaaactgtttttattattgaggaggatgaggcatgaaaatactaagatatatcggatatcttttactgggtggacttgtagggggtatcataggtggaattttaggtaattttgatggatttggtattgagaacttgacgtttgcgacatataacaatgtcgttgtaatatcgattgttgcgacgattattatcatattggtagaagccattgttttgatgaatcaaagacgtgcattgaagtataagcaacttgtagataaagaggtagatatcgatgcaacagatcaatatgagttgcttgcgaatcgttatgttttaaatggaagtatattaagtattctgcagacagttattgcttttttagtattgcttatttttgtggtagggcacgctgcagcaaatgcaatactattctttttaataccattttttgctagtgctattttcaatacacaatttacactgtttaatagaaggtttgatgacagaataccaaaaattgcagataagaattacactgaaaagcgattggaaatattggatgaaggtgaacgccatatagaattaattgcattatttaaaacatatgcgatcaacttatcaatattgatactagccattgtagtaattgggctttattcaattactactggaattaatcaaagctttagtttgctacttatcattgctattttcatatataacgcctttagttacttattgaagagaagacgtttttattaaaattaaacaaagaggagcatggatatgacaacattgttaaacgtagatagtgtgaacaaacaatacaaagattcggattttaaattgcaagatgcatctttaacgatttctactaatgagacagttggattaattgggaaaaatggctcaggtaaatcgacattaattaatattctagtaggcaatcgacataaagataacggtagtatcacattttttggagaagaacataccgtggatgatgtcgaatataaagaacacataggtgtagtgtttgatgatttgagagtgcctaataaattgactattaaagatattgataaagtatttcaatctatttatatgacttggaatagtcaaaaattctttgatttaatcaaatatttcgagttaccactacaaactaaaattaaaactttttcaagagggatgcgaatgaagatagctttaacgattgcgctttctcatgatgtgaagttattaatcttagatgaagcaactgcaggtatggatgtttctggaagagaagaagtaatggaaatactagaagattttgtcgcacaaggtggaggcatcttaatatcatcgcatatttctgaagatatagaacatttagctgataaattagtgtttatgaaagatggacgaatgattttaactgaacagaaagatatacttttagcacaatatggaattgttacgacagaagataaagatgttgaaattcctaagcatttaatcattgcttctagattgtcaaaggggaaatatcaaattttagttaaagattatgcagaaattgaaaatgcagagcctttaaaacacattgatgacgctacaaaaatcataatgcgaggtgaagtataatgaaaggtatgttcctaagtagtttttatgcaacgagaaagcaaacatatatttattttatagtcgctattatagctgcaggatactttgcagtatttaatccgttgatgagttcggcaatggctggggttatgttaatcacacctattactgataatattaaacatgaaaaagactcaagatggatgtattatgtatctactttaccggttaaacgtagtgattatattaagtcatactttgccttttatttaatcttattcggtgcaagtttaatgattggattagttgtgactacgattgtgacccaaagtgtgatgattggtattatgtcaggtttaatgagttttggtatcataggggcatactctatcattttcccattgacatttaaatttggcgctgaaaactccaatgtcattatgatatgtgcatctatactactacttatttctttcgtggtctttttctttatatatggtatggttagtggtgcatctgcattagaatttgaaaaaattagcactgaaggatggctagttgtcatagcatatgcggtcattggtatagttataacgagcgtttcttatatattgtctattaaaatttttaacaaacaagaactataattgtcgattttggtgatgatagtatttgaaataatatttagagcaggtgataaatctttacgattgtcatctgttctttttggtgtggaatgaaatgtgggggataagtataggtgacatatctatattgatttatttgttttgaggtggttatgttgtgtgggaattatttccttttagatagtggggattagaggatatatgttatttataagtatcatttgatgattgtataggctaacgatttcctcggaaatatttaaaaacctcgatcatgtagcataactgaagtttgtcacaaaagtataatgtgaagttcgacacttttggattcagttccaatactttgaccgaggtaaatactatttattcatgtttattacgtagacgttgatttttaaaataaatcagcatgatgcagaaggttgcaactgatactgagataatcattacatggtcgtgacctttaaataaaaggctgacaatataagacataacgagtatacctagtgaatatgaaatatacttcgcgtttgtcagttcattatggaaataaggcgtgattaaccataatccaatatagaatattaaaacactgatatacatcatattaatttcaaacaagtcatttagtttattgttattactaaaaacaattgcagcattaatcacacctaaagcgatattgattaatagatgcgtatacgataaacggaaaccgatagatgttaatttatgattaatataattttcagtaatgatccaatatacaccgaaaagactaattaaaatcataaattggaatatataaatgtaactaaaatgatcaatgctaaatgatgacgaagctaaaccaaccagtacctcgccaaagataataattgttagtaacgaaaaacgttctactaaatgcatcatattaacaggtgataatacaagatatttctgaaatggaataagtcctgtcgctgcaatgaatacgcctaaaaatccagggatgtaatggatactttgtggtagtactaatgatagaaatgataaaaatgaaatcacaaaggctacgctcgcaaaagcttgacatgtacgcttatcgccataatctaaccctgtacgtatatgtaataaatactgtaatccgatacttaaatacataattgccacgcataagaagaatgggaagaatgtcttttcaaagtccggatataggctgttagataggaagaccatgatgaacatattaaacatcataaacgagacgtctttgaatgtaacttgaccaaatcgatttgtaaaaaatgtttgatgagaccacattaaccataagaacaaactcatgacgatgtatttgaaaaataaatcagctgaaatggaaccgttttgtgttgttaaaatcacatgtgcaattttttgaatggcatagacgaaaattaaatcaaagaacaactcatggaatcctgcacgcttttcagctaaatgttttggtgttaatgcattaaccataaaattttaactcctttaagatgtgtaattaatttactaagtatactatttattttttctagtgaataggggcagatttggcgatgaagtggaaggagaggtgactgcaaggtaattgcggaattaacaatcatcagcgatttaatatttgactggagacgtcatggtaataaaaaattgatgagaaattgatggtgaaaccagctgtgaatagcgatgcaatgatagatagaatttaattagagtcattacgcgaaatgattaatgataatttgtggtaaatcaaagcataattttgtactatagatgaggatgatagagcatatttaagagggtgaaatgttaaagtgaaaccgtttacgtttccgattgcccaaacaaattacatcattgtataatatgatttgttaaatgcataacaagaatgaaaatgtaacatacgtagcaattggtttcataaattggatgttagtggcgtattggttcattagacgtattagtaataaaattgtatatatcataaggagatgaatatgacatgacgagagtcgtattagcagcagcatacaggacacctattggcgtttttggaggtgcgtttaaagacgtgccagcctatgatttaggtgcgactttaatagaacatattattaaagagacgggtttgaatccaagtgagattgatgaagttatcatcggtaacgtactacaagcaggacaaggacaaaatccagcacgaattgctgctatgaaaggtggcttgccagaaacagtacctgcatttacggtgaataaagtatgtggttctgggttaaagtcgattcaattagcatatcaatctattgtgactggtgaaaatgacatcgtgctagctggcggtatggagaatatgtctcaatcaccaatgcttgtcaacaacagtcgctttggttttaaaatgggacatcaatcaatggttgatagcatggtatatgatggtttaacagatgtatttaatcaatatcatatgggtattactgctgaaaatttagtagagcaatatggtatttcaagagaagaacaagatacatttgctgtaaactcacaacaaaaagcagtacgtgcacagcaaaatggtgaatttgatagtgaaatagttccagtatcgattcctcaacgtaaaggtgaaccaatcgtagtcactaaggatgaaggtgtacgtgaaaatgtatcagtcgaaaaattaagtcgattaagaccagctttcaaaaaagacggtacagttacagcaggtaatgcatcaggaatcaatgatggtgctgcgatgatgttagtcatgtcagaagacaaagctaaagaattaaatatcgaaccattggcagtgcttgatggctttggaagtcatggtgtagatccttctattatgggtattgcaccagttggcgctgtagaaaaggctttgaaacgtagtaaaaaagaattaagcgatattgatgtatttgaattaaatgaagcatttgcagcacaatcattagctgttgatcgtgaattaaaattacctcctgaaaaggtgaatgttaaaggtggcgctattgcattaggacatcctattggtgcatctggtgctagagtattagtgacattattgcatcaactgaatgatgaagttgaaactggtttaacatcattgtgtattggtggcggtcaagctatcgctgcagttgtatcaaagtataaataataagaaaacaggttatcacaacagtattaattacatgttggcataacctgtttttatttgtttatggatttattgggtaatattagtcatttgatggtttaattgcaaatgctctaacagggaacccaggtgcatcttttggtttagggctgatagcgtaaatgatggcgccacgagttggtaattgatctaaattagttaataactcgacttggtatttatcctgaccaagaatataacgttcgccaactaaatcaccattttttacaacgtccacagatgcatcggtatcgaatgtttcatgaccaacagcttcaacacgacgttcttcaattaagtacttcaaagcatctaatccccaacccggtgcatgttgttgtccgttcgcatctttgttttcaaacttttcaatattaggccaacgttttgaccaatcggtacgaagtgcaacaaaagtgccaggttcaatagtaccatgctctttttcccatgcttctatatgcgcacgtgttacgatgaaatcattgttgttcgctacttctgttgaaaagtctaatacaattaacggcaataccaattcttttaaatcaatgtcttctaaataacgtttattctcgacaaagtgaattggtgcatcaatgtgagtaccatattgcgttacaatattccaacgttgcacatagaaaccatgatctttaaccgtgaataaagttgaaacttcgcctttttcaaactcactaaaacgtggtatttccggatcaaatgtatgcgttaaatcaacccaagttgcttgttttaaagtatttaattgttgccataaaggatattgtgtcataaaatcacccgtttttagtttattatatgataaatgctgcgattattcttggcgtttagctttaacagcattcacaagcacagtcaatgcatctttaacttcttcttcttttcgcgtttttaaaccacagtcagggtttacccagaataatgagcggtcgatttgttgtagtgaacgattgattgctgtagtaatttcttcttttgttggaatacgtggactatgaatatcatatacacctagaccaatacctaaatcataattaatatcttcaaagtctttaattaaatcaccatggctacgagatgtttcaattgaaataacatcagcatctaagtcatgaatagcatgaatgatttgaccgaattgagaataacacatatgtgtatggatttgagtttcatcacgaactgaagacgttgcaagtttaaatgataaaacagcatctttaagatattgttcgtgatattcagagcgtaatggtaagccttcacgtaatgcaggttcgtcaacttggataactttgattcctgcagcttcaagtgctaatacttcttcgttgattgctaaagcaatttgatcttgaacgactttacgtggtaaatcaacacgttcaaatgaccagtttagaattgttacaggtccagttaacatacctttaactggtttatctgttaagctttgtgcataaactgtttcatcaacagttaaaggcgctgtccattttacatcaccataaatgattggtggttttacggcacgtgaaccatatgattgcacccaaccgaatttagttactaagaaaccttgtaatttttctccgaagaattcaaccatgtcattacgttcaaattcaccgtgaactaatacatctaagccaatgtcttcttgaattttaatccatcgagcaatttcattttttaagaatgtttcatatgcttcgtctgtaatgcgtttgttcttccaatctgcacggtattttcgaacttctcggctttgtgggaatgatccaatagttgttgttggtaaatccggtaagttcaaacgtttttgttgttgttcaatacgttgcgcgaatggtgattgtcttgaagtacgcacgctttcgaaatcataatctaagtttttgaatgattgattttggaaacgctcataacgtgcttttaatttatcatatttaacactatcgttttgattaaataggcgacgcaatgcatctaattcgtctaatttttcagttgcaaagcttaagccttcgccaacacttgtatctaatgtttcatcatctaaagatactggaacatgtaataatgaagatgatggttgaatgacaagttcattagtgtgtgctaacaatttatcgattaagacttttttagcttcaatgtcacttgcccatacattacgaccatcaataattccagcgtataatgtttttgatttatcaaaatctccagcttcaatttgtttaaggttatagccattatcatggacaaagtctaaacctataccaccaacaggtaaagaacttaagaatttaagatgtgcacgttcaaagtatgtttgaatgactaattttttagcaacaccagctttttcgaaatagtcataagcttcacgtgtaatattttcatagctttcgctgtcgtctgtaactaagattggctcatcaacttgaatgtactcagcacctgcatcaattaatgattcaaacacttctttataaagtggtaataacgttttaactttttcttcaaaagtttggtgaccgccttttgataatttaacaaaagtaatcggaccaacaatgacagggtgagcgttaacgtttaaagattgggcatatttaaagcgatctaataatacattgcgactcactttaggctcaacattgtcccattcaggtacgatgtaatgatagttagtgttaaaccattttataagtgcacttgcaacatggtctttattaccgcgagcaatatcaaataataaatcatcatcaatagttcttccttggaaacgttcagggatgatgttgaataataatgacgtatctaatatatggtcatataaagagaaatcaccaactgggatgctatctaagtgatagtacttttgtaataataaattttctttatgtagatcagttaatgtttgatctaattcttctttagaaatcttctttgcccaataactttcgatggcttttttccattctctttttctacctaatcttgggaatcctaagtttgatgttttaattgttgtcataatattgcctccttgtgagcagtaatagattttgagtatgctgcaagttctaatgaatcttcgacattttgaaacggtgtgataatgtataaaccattaaaatattcatgaacagtatcgattaaatcctttgaaagcttaagacttagttctcgtgttttggctttatcatctttaactgcttcaaattgttgtaaaatttcatctgacatcttgattcctggcacttcattatgcaaaaagagtgcgtttttgtaacttgcgataggcataatgcctatgaaaaatggtttgttcaagtgcttagtggcatggtaaatttcaatgattttctctttgctgtacacgggttgtgttataaaataagacattccgctttctatctttttctctaatcttttgacggcaccatataatttacgaacattagggttaaaggcgccagcgatgttgaagtgtgtacgtttcttcagcgcatcaccgtcagtgttaataccttgattaaatcttagagcgagttcagttaatcctttagaattaacatcatagacattggttgcacctggtaagtgaccaacttttgaaggatcaccagttatggctaatatttcgttaacgccaatgagcgataatccaagtaaatgggactgcaagccgattaagtttcggtctcgacatgtaatatgtacgagtggttcaatattgtaatattgcttaattaagctagcagcagcaatattgctaattctgacagttgccaatgaattatctgcgagtgttaccgcatctacattagctttatcaagtttagcgatattttcaaaaaatctatccgtgtctaaatgtttcggtgtatccaattcgataataacggttggacgttcttgaaccttagatgttaatgattgtctaactttattttgagatggattgaaaagtgctttcgttggtatcggaatcacttttttgtcattaacaggtttaagtgtctgaatagattctttaataaatttgatgtgctctggcgttgtaccacagcaaccaccaattaaacgaacaccttcgcgaattagattttgagcaacttgaccgaaatattgtgcattgtcactatacttaaattcactattttcaatatctaataagctggcatttggataacaagataagaatgcgtgctctggtaattcaatatgtgtgaaagactcttgcatatggtgcgggccatgatgacaattgagtcccacgatgtttgcaccacattgaacgagttgttttaatccttcattgattgcctgaccattaactaagtaatttgtgtttgaagcggttaattgagcaatgattggaatgtcgtatttctttctcgttcgtgaaatgacatttgttaactcttctaggtcgtaatacgtttcgaaaagtagcgcgtcaacgccttcttcaattaaggtgtctatttgaatttcagtatgataaagaatagtttgtaagctgatatcctcttgtttgatacctctaaacccaccaactgtgcctaatatatacgtatctttatttgctgctttttttgcgatgcgaacggcggcttgatgtattgctttaactttatcttcaagaccgaatcgttttaacttttcaaaatttgcaccataagtattggtttgaatgacatcagcaccggcttcaatatatgaacgatggatgcgttcaactttatctggatggctaagattatatgcttctggacaggtgtctaatccttcagagtataaaatggttcctatagcgccatcagctactaaaacattatctttcaattgtgtgaggaattgactcattgaatgcctcctttaatgcgtatttgatgtctgcaatgagttcatcaggatcttcgagaccaacacttaatcggaatagaccgaaagtgataccacgttcttgtctcacttcttcaggtagtgcagcgtgagacattgttgctggatgtgaaaggatcgtttcaacaccgcccagactcactgaaacgagtggtaatgtcagtgcatcgacaaattgttgtgctttagactcatcagctaaacgaaagccaataacggcaccgccatttttagcttgttctaaatgagcagtagtgagtcccggataataaacttctgaaatttcatcttgctttattaaaaatgacacgattttttgagcgttttcgacagattgtttaaatctgattggaaaagtttttaaatgtttagcaagtgtccagctatcctgagcagataacatattgcctgtaccattttgtattaaataaagagcgtcactaattgcctcattattagttatgacagcaccagcaattaaatcgctatgtccacttaaaaattttgtagcactatgaatgacaatatcagcgccaagtaataaaggtgattgacctaacggtgtcataaatgtattgtccacagctaccagtagttcatgcttttcggctattttagaaacagctttgatatcagtaattttaaaacagggattcgatggtgtttcgatataaattaattttgtgtttgattgaatggcaccctcgatttgttcgagctttgtagtatctacggttgtaaattcaatattaaatcgattcaaaatttgctcagtgaggcgaaaagtaccgccatatacatcatcgggtaagatgacatgatcaccagatttgaaagtcaaaagtactgctgaaatagcagcaatacctgatgcaaaagcaaaagcgaattttccctgttctaatcgtgctaacttctcttctaaaagttcacggttagggttgccacttcgtgcataatcatatttaacatcgccaccaagacttgtttgatggaatgttgaagaatcatagagtggtgggttagctgaatgatattccacacctctacgccaatcgaatatcacttctgtctcttttgaaagtgtcatacaatctctccaatctgagctttatctaatgcttggatgatatcgcgttcgatgtcttcataattttcaacacctagtgataagcggattaaatactcatcaatgccacgtttatctttttcagcatctggcatatcaacatgtgtttgggtgtaagggaaggtcactaatgtttcagtacctcctaaactttctgcaaaaatgcaaatgtctaaattttctaataatttagcgacgctataggccttgttaagtcttaaactaagcatgccagtttgcccgctatatagtacttcgtcaattgcttgaagtgactgacattttttagcaagttttctagcgtttgattgcgcacgctcaatgcgtaaatgcaaagttttaagtccacgtaacaacaaataactatctattggtgaaagtgttgcgccagtcatgttgtgaaaatcaaacaactgttgcgcgagtgattcatctttgacggttacgacacctgctagtacatcgttatgtccgccaatatatttcgtggctgaatgtaagactatatcagcaccttctgctagtggtgttgaaagataaggtgttaaaaaagtattgtcgataattgacaataagcctttagctttacaaagttgatagtatggctttacatcaatagcaatcatttgtgggttagatattggttcaatgaataatgcaactgttttatcagtgatttctttttcaacttgttcataatctgtaaaatcaacgtacttaaatttgatatcgtattgttgctcgtaaaattcaaataatctaaatgtgccaccatataaatcgaatgaaactaaaatttcatcatgaggtttaaatagattacatattaattgaatggctgacattccacttgatgtagcgaatgatgcaataccatgctcaagtttggcaaaacaggtttcaaatgttgagcgtgtaggatttttagtacgtgtataatcaaaacctgtcgattgtcctagttttggatgcttgtaggcagtagataaatggattggattcgctatagcaccggttgaatcatcggttaatgtgatttgggctaactgtgtatccttcatattaagaccctcctataagaaaaaataaaaaaagcttccgtccttcgtacccgaatgaatcggataaaaaggacgaaagcttatgtttcgcggtaccacctttatttgttattccatcgctgaaataaccttattcagtacgcattaaaagtaaatatgcttactgaacaattatcacaattaaagtcagtaagtaaggatatagtaatgtgctatcccatacttattaacaaaaaatcgtgcgtaaagaatccagtacgccatttaacatcaatgttaatactgtatcgctataacgggcgaacccgtagacacctcatattggcatcaacactccaaggccattttcaaacacgctttcaaaatcttctctcagctactaaagactctctgtataagcagggtgtgttttactttcctctttattgtgtttacgtttcattaaactgttataagatattaattagcttacagagtaaaaaaagatttgtcaacaattattcagaaaattttgatttaaaagttaatttgtttgtgaaattgtaattggtatcttgaagttgaaaaatgaattattttttaaataaagtgtggttaatggttgtctgactcatttagaatacataaaatatatttaactgttgttatcaaataaaaagtgatgtgagtgaattgtcaaaaagtgaagatcaacgtattactaaaacaaaagatgaacaaattaagcaaatagatatatcggatatcaaaccgaatccgtatcagccccgaaaaactttcgatgaaaatcatttaaatgatttggcagattcaattaagcaatatggaattttgcaaccaattgtgcttagaaaaacagttcaaggttattacattgtagttggtgaaagaaggtttagagcttcgaaaattgctggtctaaaatacgtatcagcgattatcaaagatttaacagatgaagatatgatggaactggcggtcatcgaaaatttacaacgagaagacttaaatgcgattgaagaagctgaaagttatcaacgtttgatgacagatttgaaaattacacaacaagaagtagcgaaacgattgagtaagtcgcgcccgtatatagcgaatatgttgaggttattacatttgccgaaaaagattgctgacatggtaaaagatgggcgactgacaagtgcacatggacgaacgttattggcaattaaagatgaacaacaaatgcttaggttagcgaaacgggttgttaaagaaaagtggagtgtcagatatttagaaaaccatgttaatgaattaaaaaatgtttcgtcaaagtcggaaacagacaaagtagatataactaagcctaaatttataaagcagcaagaacgacagttgcgagaacagtatggtaccaaagtagatatatcaataaaaaaatcggttggtaaaatctcatttgagtttgattcacaagaagattttgtgagaataattgaacaattaaatcgtaggtatggtaaatagttacacaattttatataataactctttgtgcaagtgtaaataaattgtaatcagtgaacatttgattctagatatattgagactttcgtaggttggaagtatataaaaatatgaatacaatattgatatatcatatagaagggagtaacgcttatcatgaatcaagtcatgaatattatttcatctctatttgagccattaacaaaaatagaaacatatgaaaacattgcaactaaaatcgctatgattgttatttatattatcgtagccctcatagttattaaaatactgaataaaatgattgaacagggatttaagattcaaaataaaagtaaaaagagtaacaaaaagcgctctaaaactttaatatctcttgttcaaaatgtagtgaagtatatcgtttggtttatagttattacgacgattttaagtaaatttggcattagtgttgaaggggtaattgccagtgctggtgtcgtaggcttagcagtaggttttggtgctcaaactatagttaaagacgtaattacaggattctttattatatttgaaagccaatttgatgtaggtgattatgttaagataaataacggtggtacaactgtagcagagggaacagttaaatcaattggacttcgttcaacacgaatcaatacaatttcaggagaattaacaattttaccaaatagtagtatgggtgaaataacgaactactcaattacaaatggtacagctatcgttaaaattccagtgtctgtcgaagaaaacattgataatgttgataaaaaactaaacaaactatttacttctttacgtagtaaatattacttatttgttagtgatccggttgttattggtattgatgctattgaagatacaagagtaatattgagaatatctgcagaaacaattccaggtgaaggatttgctggagctcgaattattcgcaaagaagtacaaaaaatgtttttacaagaaggtattaaaacacctcaaccaattatgactgcttataatcatagtgaaaacggtgtttagtagtttataatacatggaggtcatatttaatggcgtcaaaatatggaataaatgatatagtagaaatgaaaaaacaacatgcgtgtggaacaaaccgttttaagattattagaatgggtgcagacataagaattaaatgtgaaaattgtcaaagaagtattatgattccacgtcaaacgtttgataaaaaacttaaaaaaatcatcgaatctcatgatgatacacaaagataggagaatgattaatggctttaacagcaggtatcgttggattgccaaacgttggtaaatcaacattatttaatgcaataacaaaagcaggtgctttagcagcgaactatccattcgctacgattgatcctaatgtagggatagtagaagtgccagatgctagattacttaaattagaagaaatggttcaacctaaaaagacattgccgactacatttgaatttacagatatcgctggtattgtgaaaggtgcttcaaagggagaagggttaggtaataaattcttatcacatattagagaagtagatgcgatttgtcaggtcgttcgtgcatttgatgatgataacgtaactcatgttgctggtcgagtagaccctattgatgatattgaagttattaatatggaattagtactagcggacttagaatctgttgagaaacgtttgcctagaattgaaaaattagcacgtcaaaaagataagactgctgaaatggaagtacgtattttaacaactattaaagaagctttagaaaatggtaaacccgctcgtagtattgactttaatgaagaagatcaaaaatgggtgaatcaagcgcaattactgacttctaaaaaaatgctttatatcgctaatgttggtgaagatgaaattggtgatgatgataatgataaagtaaaagcgattcgtgaatatgcagcgcaagaagactctgaagtgattgttattagtgcaaaaattgaagaagaaattgctacattagatgatgaagataaagaaatgttcttagaagatttaggtatcgaagaaccaggattagatcgattaattagaacaacttatgaattattaggattatcaacatattttactgctggtgtgcaagaagtacgtgcttggacatttaaacaaggtatgactgcacctcaatgtgctggtatcattcatactgattttgaacgtggatttatccgtgccgaagtaacaagttatgacgactatgtacaatatggtggcgaaagtggcgctaaagaagcgggcagacaacgattagaaggtaaagaatatattatgcaagatggcgatatcgttcatttcagatttaatgtataaacgatagagtgaagttaattaaatagtatatatgtagaagaggcggaatcaattgttcgcctcttttaattatgcgtataatttattaaaagaatggaataattttactcgcgttaataatatcttgagtgctgaaaaattgtttgccttcgccagtataagcaggctctaaaacaagattagcctttgcacaataaagccattcaggatgaataccactattaagtatctcttggaattcttgaaaatctttagaccaatcaatatttaaattcattccttaccacctcacaactattatagaacatatgttcgcttttgtgaagtgtatttttaaaaatatcatagaaagtttcaaatgaattaatatcaaaaatgatatgaagagtagtttgaattattattgtaaaaagtaatggcgcatgatataattctttattgtgagtaatgaaaattattccttgcttatctgttttaagattgataagccgtatagaccacaaggaggtgcaaatataaaatgagaacatatgaagttatgtacatcgtacgcccaaacattgaggaagatgctaaaaaagcgttagttgaacgtttcaacggtatcttagctactgaaggtgcagaagttttagaagcaaaagactggggtaaacgtcgcctagcttatgaaatcaatgatttcaaagatggcttctacaacatcgtacgtgttaaatctgataacaacaaagctactgacgaattccaacgtctagctaaaatcagtgacgatatcattcgttacatggttattcgtgaagacgaagacaagtaataattagagggggcgtttaaatgctaaatagagttgtattagtaggtcgtttaacgaaagatccggaatacagaaccactccctcaggtgtgagtgtagcgacattcactcttgcagtaaatcgtacgttcacgaatgctcaaggggagcgcgaagcagattttattaactgtgttgtttttagaagacaagcagataatgtaaataactatttatctaaaggtagtttagctggtgtagatggtcgcttacaatcccgtaattatgaaaatcaagaaggtcgtcgtgtgtttgttactgaagttgtgtgtgatagcgttcaattccttgaacctaaaaatgcgcaacaaaatggtggccaacgtcaacaaaatgaattccaagattacggtcaaggattcggtggtcaacaatcaggacaaaacaattcgtacaataattcatcaaacacgaaacaatctgataatccatttgcaaatgcaaacggaccgattgatataagtgatgatgacttaccattctaataaaaattaacgaaattaaagcgaaaaaattatcaaaggaggcacacaatcatggcaggtggaccaagaagaggcggacgtcgtcgtaaaaaagtatgctatttcacagcaaatggtattacacatatcgactacaaagacactgaattattaaaacgttttatctcagaacgcggtaaaattttaccacgtcgtgtaactggtacttcagctaaatatcaacgtatgttgactacagctatcaaacgttctcgtcatatggcattattaccatatgttaaagaagaacaataatatataatttattgtcaaaccccgtaggcataggcttacggggctttttgtgttttggggtatagaaaaagggcaaaaaaggatgatgtgaatgttttgtgttcggaatttgcacaaagatatgtttatattgcaaaaataatatgaatttagatgcataaaaaaagaactacgcattttaaataaaatgcatagctcttctttttcttgcatacgaattaaaataactcgcgagacctataagtctctttcctcactagatagtttatacttttggtctgttgaagtcaataattttatctaaagctataaaaaatcttttgatagctaatgcattattataatagctttcgtttcttttatatcgcttttgaagttggtccaaatcgtgatatcttgcttggataattgcattactacaaacttgattatgtaattctagcgtagcgaaagtatctatgaaattttttattccgaacatgtttctagatatgcctatattattccctttttcaaataaatattgaggtaatctactgtcataatttagatttgctatgatgggttggttatgagctgatttgtttcttatatttttaactaaaggcattaaaatattagcaactctcaattcttcgtcattgtacttcttgtaatagaagttgagaaacgaaacgaattgacctagttgcatgaattcaatgcaaacccatgcgggtggattttgatagtatttattcaacttctcgggtagttgtcctcgtttattcatatgcttgaatatttcgtttttatttttgattttggtttccataacttcttctggtgttcttgaatttgtgtcaaaatttgaattgctatatgatttatcaatacataagaactcatctattattttataaccatcttcttggttattttctgttattagttttaagactagatactttaaactatgttcaatatctaaagttaaatgcaacattgtgtatcttaatttcatatctatagttgctaaatctgataaataagcaaattctatgaaatagccgccattctttttttcgaaattttttcggaaataagctagtttgaagaagtaattattttttctaagaatttcatttgctttttcggtgtcaataatattaaaaaatatattcatctgttttaatttcgctatttgctcatcaaaattgagcataggcttaatttctgctagtgtatcatctttttccaattttaactccccaatcgttcaaatttattcatcatatctttcgccatctgattagtaacatgtgtgtatatctctagattttttttataatctgaatgacctacatgctcttgcattgcttttaagttaattcctaattgagcaagtgtagatatatgcgaatgatgtaatgtatgcgtcgttataggtttcttaatagaactaatatcagcgcccccctttaataatgtggctaattttgttcgagtcgatagggctaccagacgtatttgtgaatatgtactctctatcaataaacttatcattccaagcataagtgttcttagtaagtcgatgctttgggtagtgagccctgtggccttatagctattacttctttcagttgtctcctttactccgaatgctcccgtcttttttcagttatccaattaactttaccgtcgatatctagcgttttatcttcatagtttatatttactctctttattgcaagtagctcaccgatacgcatgtcattagcaatttgaaactgtaccatagcttttaccattttataattacgttttgtcgttggatatttttatacttaattacatagtcgaaacaatccagtaactccttaacttcattatcttctaatgtgttattatgtttagctagtaacgcatcactatagggatatctattttatctattacacatataactttgaattgcttgctattttaaattaacaaattttattctcttagattttgtccaattatgtgtagacgatttatagttattaaattcagagtggtagcaaattaaagttaatcaagagttaagatgaatttaattcatgaacacgtctattatttttataattgtagcaaataaagctttacatcaaggaggtaattaaatatgttcaaaaaatatgactcaaaaaattcaatcgtattaaaatctattctatcgctaggtatcatctatgggggaacatttggaatatatccaaaagcagacgcgtcaacacaaaattcctcaagtgtacaagataaacaattacaaaaagttgaagaagtaccaaataattcagaaaaagctttggttaaaaaactttacgatagatacagcaaggatacaataaatggaaaatctaataaatctaggaattgggtttattcagagagacctttaaatgaaaaccaagttcgtatacatttagaaggaacatacacagttgctggcagagtgtatacacctaagaggaatattactcttaataaagaagttgtcactttaaaagaattggatcatatcataagatttgctcatatttcctatggcttgtatatgggagaacatttgcctaaaggtaacatcgtcataaatacaaaagatggtggtaaatatacattagagtcgcataaagagctacaaaaagatagggaaaatgtaaaaattaatacagccgatataaaaaatgtaactttcaaacttgtgaaaagtgttaatgacattgaacaagtttgaaattaagctaaattagtatatatagtgttttatcgctaatactttgaaagttaggtatctaaaggtgcctagctttctttgttatgattagcaccatcatatagaaaattctttaatgacgtttatgccgaaatctacaaaaataatttctcttttatggttaatcaatatgtttttacattcgacaaccttaaaattaacttctttcaatttcataataaagtctctataaaataacttagtttaaaaacgattcgtatctttcagattcaaataccatcattttctcctaatacttacactttaattacaattatgtaagttgttttcagatacatcctattttatattttgtcagaggtgatcttttgaaaacgattttaaaaacaataacatatcttgtacttactatcattggcgcttatgctgctttattcattttaaaaacaatagactcccatggtataacagatcaatttaacccattagtaaagaaggatgattcttatgttaaaacgacagaggtgtctactagaatggatgatcaactccgaagttatagtcaaagtgtttttaataaagaagggaaagagacgcaattaatgtatactgctacatttgatgttaaaccgcatagatacttgaaaattacacataaaggtcatcatgtagaaacttttgaagaagttgaaaaggaagaagtaccaaagaaagcattagacaaactgagtcgataatagcatgcttatattacatggttcatttataaaaggagtacgaacgaaagtaacgcatgacgattaatttaaaaatatttgtaataattatgaataaaattaaaaacaaggggtaatacaatctatatagcatataagcttttgttatgagtttcaaaaataggaagagagagtgatattatgaaattaaaatcattagcagtgttatcaatgtcagcggtggtgcttactgcatgtggcaatgatactccaaaagatgaaacaaaatcaacagagtcaaatactaatcaagacactaatacaacaaaagatgttattgctttaaaagatgttaaaacaagcccagaagatgctgtgaaaaaagctgaagaaacttacaaaggccaaaagttgaaaggaatttcatttgaaaattctaatggtgaatgggcttataaagtgacgcaacaaaaatctggtgaagagtcagaagtacttgttgctgataaaaataaaaaagtgattaacaaaaagactgaaaaagaagatacaatgaatgaaaatgataactttaaatatagcgatgctatagattacaaaaaagccattaaagaaggacaaaaagaatttgatggtgatattaaagaatggtcacttgaaaaagatgatggcaaacttgtttacaatatcgatttgaaaaaaggtaataaaaaacaagaagttactgttgatgctaagaacggtaaagtattaaagagtgagcaagatcactaaaaagattcgttgcattaacgcttgtaaaatgtcttaattcatattaattaataaaataccctcacaacgtaatgtaatatatccagtatagatttgaaaggatatatgccaaacgtgttgtgagggtttatttgcatctatttatccatgcgaatatcgacttcttctaaatgtttctgatattctttaaccttactttctaaaaacatttcatatggtgcatcaaagaagtcagctaaatgcatggcatctttaaatttaggttcatggtgatgattctcccattcccaaatttgatgtgcttcatatttagtaccatatttctcatttaattgctgtgctaattcgtcaatttctaaattatgtttagttcgtaagttatataaaatatgcatattcattgttcattaacctcgcttcttgatttaaaattcaaagatgctctaataatatgtgtatattctagtcctataacataaaataatcaagctatgaattcggcagaaaaaataatgtaaatgtatatgatattatcggtacagagactttaaataacgatagctacattgaataaaattgatattcaattactacttttaaaaatatttggataaaaataatttgaatttgttttagaattgtaaataaggggtactacttagaataacgcaaaataaatagaaaaaggagactgaaaattatgtttggatttattggaatgttaattgtcggtggcttaattggatgggctgctggtgctattatgggtaaagatatcccaggtggtattttaggcaatattatcgcaggtattattggatcatgggtaggtggcaaactattcggacaatggggtcctgaattaggaagtatttacatcttgccagcattaattggttcaattatcttaattgcaatcgtaacgttaattttaagagctatgcgtaaataataaaaaaattcaattggaaattgaaataaagatggcattcagttgtcatcttttttatttgcgtgaaaatggtcaatatgtattataatatttgaaaatgtagataagataggattaaaaagtaataaattaatatgaggaaattttggaaataaaaaagcgagtatttgacaaataaaaaaaggatgacgttgggttgcgccatccaggagtattatgttcatgaatataaaagactgtgtagtcatttaagaactacacccatatagtaacacatcacttgattaaagacaatactatttttagagtcattaatttaaaatatgaattaattctttttttagaatagaatattaagattgatatcgaattagtagtcaaagtgttatggtagatatgaaatacataaggtaaggagtaatattatgacgatttatttagttagacatggcgaatcaaaatcgaattatgataataaacattttcgatcttatttttgtggacaattagatgtgccgttaacggatactggcacaaaaagtgcagacgatttatgtgattattttaaagagaaacagattaaacatgtatatgtttcagacttattaagaacacagcaaacgtttgaacatatttttccatatgacattgcatcaacgactacccctctattaagagaacgttcacttggcgtatttgagggtgaatataaagatgaaatcagtgcgaatccgaaatatgataaatatttcaatgatccaaactttaaagactttcgtcatagtttttcacaaaaagcgcctgaaggagaaagttatgaagatgtatatcaacgcgtagaacattttatgaatcatgttgtcaatgaagatacacaaaaagatgatattgtcattgttgcacatcaagttgtcattcgttgtttgatggtttattttaacaaagtttcaagggcagaagctgtggatttaaaggtagaaaattgcaaaccatatatcattgaatagaagtatagaggttctgaaaaactgtgttttatagcggccttcagaacctttttttcatttggaatttaaggggaatcattcttttcaacagacttaccaccaatggctaatgtgataattgtgcttgtgaacaaaataattgaagttataaatgacgctaatgtaaaaggtgtaaattgtgtgagcgataatatcaatgataaaaagaaccaagagatagcccctagaaattgtaaaatagcagaagaaattctaaaactcatataatcatatatagctaaaacaagtgaaggtaatgcgactaataccattataatgatgttgagggtgaataaatatggctgttcaaaagttactgtgtttggtcctgttggatgcattgctgctaagaacaagcaaacaatcgtcgataaaattgctaaaataataaaagtaattcgaactttcatcatgatcatcctttgtttatagagtcaatataagtatggaatatgttaggtatatagtcaaatgcgtcaactaatgggaattttggcatagatagagaatttaaggcaattaaaaaggcatcaaacagtaatatgctgcttgatgcccaaatgatgactttagctaaattgattagtcacttttaaagataaagaattgtcatgaattaaaactcatgtaatgatgtgttacatttcgcaatgatggctttcagttatttatcgataacatcactcttgatacctttagattttaagaaatctttaattttatcttgttgctttttattaacatcaccggcatattttgttggcacgtcgacaacattgattttattttgcggttgatagctaagcttttcaatatcttcatcaacattggcgattgtactatttaaagctttgaagtaattcatcattaattcaacgggtttcttatattctttaggaatattgttttcagtgacaaatttcttgaaatgcaaatcgtttttaacagctaagttagataagtggctaagtgtttctgcttgtttttcagtcacttttgtttgactgtcaatttgtttatctagtttatgttgcataatatatttgttatcaagtatatcgctatttacagacaaatacttttctatagcttgcttcatctctgcatcactaatatcactatttttcttatctgagttaaagatatcttttgtttctaattttttagcgcttttaggtgcatggatgccagtacttgtatgatgatcttcgttatcagattgatcggacgcgcaacctgtaagaattaatgtcgatgctaaaaatgtacttagtagtaatctctttttcataatgtaatataactccttagtttatctttaattgaaaaaatatgtattcatgtttaatagagtaacattgaattagtttggaatgtcacgatgaccttgcaatgaccatagacgtaaatgattacgtgcatgagttgctttttctatcaataatgcatcattttggacgttgttaaggatagctttatctataaataactgcataattggttgtactaatttagacgtaggtatcgtacgtaaaagcataataatttcgttcacatacttttctttctcaatatcatttttcatattgatttgtttgcgagaggtacatactttaagcattatcgcacatctcgttgtatatattaagtttatcataacatgattttatgtcgggataaaaaaataacagcatcttaacaaatgtaagatactgtcagtgaaatgaatgaaactttagtttctgataatatagtcaaaggcatttaatgctgcatttgcaccagcgcccattgaaatgataatttgtttgttcttctgatctgtgacatcgccagcagcaaatattccaggaacattcgtattattgttacgatcaatcacaatttcaccacgttcgtttaattcaacagcatcgtttaaccatgatgtgtttggaagtaaaccaatttgaacaaagataccatctaagttaagtagatgttcttcgccggtgttcatgtcttcgtaacgtatacctgtaacatggtcttctccgacaacttcagtagttttggcatttgttttgatatcaacatttgataaagaacgtaaacgatcttgtaacacgttgtctgcttttaattcgctagcgaattcgaataatgtaacatgattaacgataccagcaaggtcaattgctgcttcaaccccagagttaccgccaccgataactgctacgtctttattttcaaatagaggtccgtcacagtgagggcagaatgcaacacctttattaatcaattgctcttcacctggaatgtttagcttacgccaacctgcaccagtagcaataatgactgttttactttctaagacagcaccgttttctaacgtaactttaattgcttcgtcagtcttttcgatatctgtagcacgtatacctgtcattgcatcaatgtcatattgatcaatgtgcgctgctaagttagaagaaaattcagaaccagttgtttctttaacagtaatgaagttctcaataccagcagtatcattaacttggccaccgatacgatcagcaactataccagtacgtaaacctttacgtgctgtgtaaatcgctgcactaccactagcaggaccaccaccaacgattaagacatcataaggttctttattttcaaactcagatgcatctgccgtactgcctagtttcgaaagaatatcttggattgtcatacgaccattgccaaattcttcgccatttaaaaagacagcagggactgccatgatgttttcagattcttcacggaacactgcaccatcaatcatagaatgcgtgatgttagggttgatcacactcattaagttaagtgcttgaacgacatcaggacatttttgacacgttaaactaatgaatgtttcaaaatggaatgaaccttctaattttttaatttggtcaatgattgactgtttttctttaggtgcacgaccactaacctgtaaaattgctaaaacaagtgagttaaactcgtgacctaatggaatacctgcaaatgttacacctgtttcttcgccaggacgattgactgagaaacttggtgtacgttttaaagatttttcagaaagagatagtctaggtgacatatcagtaatttctgtcaacaaatctttaagttctttggatttatcatctgaaccaaggctggcaacgaattcaacgttgccctccattagttctaatagttgtttaagttgttgttttaaatcagcattaagcatggttgtaatgcctccttagattttacctactaaatctaaaccaggttgcaatgttttagcgccttcttcccatttagctgggcatacttcgccagggtttttacgaacatattgagctgctttgattttgtgagctaatgtactagcgtcacggccaattccgtcagcgttaatttcagatgcttgtacaacaccgtctgggtcgataatgaatgtaccacgttgagctaaaccagtagcttcatctaatacatcaaaattacgagtgattgtttgtgatgggtcaccaatcatagtgtaagtgattttgctaattgcatctgaatggtcatgccatgctttgtgtacgaagtgagtatcagttgatactgagaatacatttacgcctaatttttgtaattcttcatattggttttgtaagtcttctaattcagttggacaaacgaatgagaagtcagcaggatagaagcatactacgctccaagaaccttttaaatcttcttgtgtaacttctttaaattgatctttttttggatcgaaagcttgcgctgtaaatggtaagatttctttgttaattaatgacataaatatcttcctcctaagaatttaagtatgaattagaactatcaattgattgcgcttaattataataattctaatctcttagttagcattattacattttgatccagaatagtcaactggataactttgtaaagtgaatgattacttttaaaataaagaaagataatataaagtgctttgataatggattttgtagttgatgatttaaaaggttgtgtctatatttaatatcttgattttaatgtaaaaaatgtaaaaaaagaagatttgtattctcaactaagtcaaccttattgataatggtgtgagaatatttgttcgagatggatgaaggtaatgagtgagaaactggatttttaaagtatgagacaatattttaaaaagttcaattattaacttataagcaaataattgctataaaaaagtttggacgtgtacaattgcaatatgaagattttaaattaattgtaaagtatcgaggagtgggtaacgtgtcagaacatgtatataatcttgtgaaaaagcatcattctgttagaaaatttaagaataaacctttaagtgaagacgttgttaagaaattggtagaagctggacaaagcgcttcgacgtcaagtttcctgcaagcatactcaattattggtatcgacgatgagaagattaaagaaaatttacgagaagtttctggacaaccttatgttgtagaaaatggctatttattcgtctttgttattgattattatcgtcatcatttagttgatcaacatgctgaaactgatatggaaaatgcatatggttcaacggaaggtttgctagtaggtgcaatcgatgcagcattagttgccgaaaatattgcggtaactgctgaagatatggggtatggcattgtctttttaggatcattaagaaatgatgttgaacgcgttcgagaaattttagacttacctgactatgtcttcccggtatttggtatggcagtaggggaacccgcagatgacgaaaatggtgcagccaagccacgcttaccatttgaccatgtcttccatcataataagtatcatgctgataaggaaacacagtatgcacaaatggcagattacgaccagacaatcagcgagtactatgatcaacgtacaaacgggaatcgcaaagaaacatggtcgcagcaaattgagatgttcctaggaaacaaagcaagattagatatgttagaacaattgcaaaaatcaggcttaatacagcgatagcaagataccaaaataacccgcccccctctagcttaaaatgataagtatagctagagggggcgggtatttcttgcaatgaattagtgtgaagttaatgcagcattatcatttgaatcgaaagtatctttatcccaatgtttagttaacttggcggtacctgtaccagctagcattgaatcgttcacgtttaatgctgttctacccatgtcaatcaatggttcaacggagatgagcacgccggctaaagcgactggcaagtttaacgttgacaacaccaatatggatgcaaatgtagccccgccaccgacgccagcaacgccgaatgaactaataatcacgacagcgattaacgttacaataaattgtaaatcaatttctacattagcgacgggtgcgaccataattgcaagcatggcagggtaaatgcctgcacaaccattttgtccaatcgacaatccaaatgtcgcagcgaaattggcaataccttctggcacgcctagacgtcttgtttgtgtttgtacattcaatggtaaggcacccgcgcttgagcgtgatgtgaatgcaaagattaatacttccaaagtctttttaacatagcgaattgggctaatacctaacaggcttaaaataattaagtgaatgatatacatcgtaattaatgcagcgtacgatgcgattaagaattttcctaaagtccaaatggcgccaaagtcacttgtcgataatgtgttggccataattgctaatacaccgtatggcgttaaacgtaagacgaacgtcacaatcgccattactagtgaatagatagcgtcaatcgcacgcttaagcaattcaccatgatcaggttgtttgcgtgctacgcgtaaataagcaaatcctataaacgaagcaaatatcacgacagcaatcgtggaagttgcacgttgtccagtgaaatctaagaatggatttttaggcaataattccaaaatttgttgtggtaacgtatgtgctgttaaatctttcgcttgtttagcaatttcgcttccacgtgcttgttcagcgttaccaaggttaattgttgatgcatctaaaccaaacaccaaggcatacacaacaccaacaatcgcagcaatggtgacagtgccaattaaaaagataaaaatgagactaccaattttagcaaacttttctccgatttgaattttagtgaatgcagctacaatagaaatgaaaattaaaggcataacaatcatttgcaacaatgcaacgtaaccttgtccgacaatgttgaaccagtcacttgttgatgtaataacattcgaatgtgtgccataaataagatgcaataacacaccgaatactataccaatccctaaagctgtaaacacacgtttcgcaaaagatatatgtttgcgagccatcatgtgcaatattacgatgaaaatcaccaatacaataatattaatcagtgtaagaaaagcattcatgaacgtcactcctcaaatttttgaatataattccgactagtatgctaagaataatattaattttaaaatatttcaagagggcatttgcaattaaatgtaaacatgatgaaattcgaccgttggcataaggggatttgtaaacaaatcgttttgaattcagtagtgataggtggaaagggtaaatagtgtgatgagctagtcgattaaagttaatatttgaaaatgaagcagggcattaaatgcaataaattaaataagttgtcattaaagcattaataatagaaatgattttaacaggaaaaaagtgatgaatatttggaaaagatatatatcgtgcactgtcatgagagataagatatgagaaaacaaatttatccttgaatcgagatgtggctatggcggtttgataaaaattgctaacctcatatttattgaatgaaaagataataaatgatcaaccttgaaaagacgtttcgaacaaacacgttgtaaaaaattctgtcgaatcaaaattagcatcttttgagtgttcgtgtgtgcaggtggtagttcaaaagctaccgtaaacaaatatttttgtttgagcaaaaaggcgtttgtagtaaatgtgaatatgagtgtgcacttgtgcgattcgtcagttactaacacagccaaacatttaaattgaatggacttattaagatgaatctatttagaagtacacagaagccatcccatttaaaagtaacatactataaaaatttattcaaaattcaatattaatcataatgaataattaaaaaacctgaaacaaattagtttgatatgctctcttcaaagtagatattgaatggagtatatcagcttgtttcaggttttatgaattgagtattaaatttgaaagtaaattacagttctataggtttataaaaatcagtttttaaatcaaagctatatatgaattgagtattaaatttgtgttcaaatcacaagtttacaggttgaataaacgtgcgaagaaaccttttttctcttcttgaggttttggttctgacatttctgactgtgaagctgtgctgtcattttctgctttcgcttccaatgaatcgttcgaagtagcttgtttagaagcttctgcatgggcttctgctacttgttgttcagcatcatgttgcgcttctgcatctactgtagcttctttatttgaagtctcagctgcattgtcatttttagactgctcaacgctggctttttcaattgcttcagttgcagaaatttgatcctctttatctactttagtagcagtgccatcgcctgcattttctgctttagtatccgtcttagcgtctgttgatgtattcactccagcaaccttcgaatctttactgtcagctttatcttcagtaacagcattcttttcaactttatttgttgattcagctaatgcttttgcttgagaggcttgcgcttcttggatagcctcttgtgatgtttggatggcttttaaggattcgctatttgaatcgattttagatgtaagttgattttgaagttcttttaattcttgttgttgctgatgtacttgattcatcatttgaccaagtaggtgacgttcttcgcgcattttctggatttctaggcgtaaatcttctactagttgagcgacattttgattagtaggtaagtttttgtcatcgtttttgacaatgacttgcaggaagtctttttctttttctaattcatcaaacgctagatcataactatttgtttgttttactttgtcggcaatgtctttgaaaagctcgatatcttcttctttgaaatcagttgcttcacgaccacgatattcagtcttgcttagttggtaaccacgttcttctaaatgttgaacaattttacgtacttgcttctcacttagttctacgcgttgtgcaaattctttagttaacatactttaaagtcctttctgcatatactttatgtatactgacgtttgtctacgggcagtgaaacgtcagtcttgcttcatacatagtttaaacgttattgttagtgatttcaagtttgtttaaaatggtttacgtaaatccatttcttctaataaagcataaataatttcacgtgcgataccattggcaaatacatacttcaaaatataatttgatttaacacttgtaccgtagatatcctttgtcagtttaatatttttctttaaaaataagtccacttttttagtgtgaccatcattagttggatgaatgtaatcaatttcagtttgtctttcaaattgatgttcgtataaaaactgtctacggtgttcaataatgaggccgttatcttgtgttaaatctgcaggttctttagggacttccatcattaaaaagttaatacttctagaatgaacaaggtttgataataagtttagttcatgttcaatttgatgtaatgtttgcgtcattaactcatcatggttgggtaggtcttttgcgaataaataaattaaaaatgctgaattggttgtggcttcataatgtgcagttgctagactgacaacaacatcgttttctaagcctacgataaagacataatcgttttcggttttgttgttttctaatgagcgtttgatgatacgtttatcttcagttaaagataaatttaacttagtatcgtaaagtttaagtgcttcgttgtaatgtggatctttgacagattgaatggttttaaattccataagaacacctccccaatttaaataatattatagcataatcgcctgctgtaaaagactgttcataaacttttaaatggtataaaaaactgtactatcttaaattagacagtacagtaatctcattttgaattcagtgtgataactaagctttgggacctttagatgcttcagcaaaatgtgtaatatcaatctcttcataagctgaattattttcatgcacttcttgatgtgatgatttgtcacgaaccgctacaactaacattttatcgtctaaaataagttgtttatatttttctaattcatcaggcgctaagttgtagcgtgataaaactgcatgttcaccatcttctcctgttaacagtttagtcattctatcactaaatgttccacttgttgagataagggagatttcagagtcgtgtaagtcatttaggtgtaatttacttttactaataattgttagctctgattctaaataaccttcagatttcttttgattgattacgttgtataattcgccagtgtcatttactacagtaatatctgccatagttgtcgcccctttaaaaatttgtttatttaatcttttacccttcttattataaagtaaaacccttacattattaagttataagtcttcattcgcattaaacgtctctgtacatttataaaactattaaaagattacctaagcagttattgaaaaaatgccgaaaatttgctattatcgttaaataatttacataaactcatataatctaaagaatatggctttagaagtttctaccatgttgccttgaacgacatgactatgagtaacaacacaatactaggagtagcttcagccattaaattgtaaccatggtgggtgatttatatcattttatatgatggtcacagtttatttgatgaaacttcttttacattgattgcatgacaaattcgttatgcatgttcgttcactcataaaccctgaaactattatttagtttggggatttttttgtatctagcaccaatttaagagcaaaatgtttcacacaaatctgaggaggttttaagagtggagttactaggacaaaaagtaaaggaagacggcgttgtcattgatgagaagattttaaaagtcgatggatttttaaatcatcaaattgatgcaaagttaatgaatgaagttggtcgcactttttacgagcaatttaaagataaagggattactaaaatcttaaccattgaagcttccggtatcgcacctgcaatcatggctgcactgcattttgatgtgccatgtttatttgcgaaaaaagcaaaacctagcactttgacggatggttattatgaaacatctattcattcatttactaaaaataaaacaagtacggtcattgtttcaaaagagtttttatcagaagaagatactgtacttatcatcgatgactttttagcaaatggtgatgcttcattaggattatacgatatcgcacagcaagcgaatgctaagacagctggtattggtattgttgttgaaaagagtttccaaaatgggcatcaacgtttagaagaagcaggtttaacagtttcttctctctgcaaggttgcttcactagaaggaaacaaagtgacattggtgggagaagaataatgaaaaatttaatcctaagtgttcaacatcttttagctatgtacgcaggtgctatcttagttccaatcattgttggtacaagtttgaagtttacacctgaacaaatcgcttacttagttacagtagatatatttatgtgtggggttgccacatttttacaagccaataaagtaacaggaacaggattaccaatcgttcttggatgtacattcacggctgttgcgcccatgattttaattggtcaaacgaaaggaatagatgtactttatggttcgctatttttatcagggatattagttattatcatcgcgcctttcttttcacatcttgtaaaattcttcccaccagtagtaacgggtagtgttgttactatcattggtatcaatttaatgccagtagcaatgaattacttagctggaggtcaaggtgcaaaggactatggagatgttaagaacattttgttaggtttaatgacattaatcattattcttcttttacaaagattcacaactggatttattaagagtattgccatattaattggactcgttttaggaacgataggtgctggcttacttgggatggtcgatattaatcaagtcaatcatgccggttggttaggcatcccagtgccgtttagattctctggatttagctttgatgtgacatcgacgttagtgttctttattgtagctatcgttagtttaattgagtcgacaggtgtctatcatgcgttaagtgaaattaccggtaagaagttagaaagaaaagattttcgtaaaggttatactgcggaaggtctagcgatagtgttaggttctatattcaattcatttccgtatacagcctattcgcaaaatgtaggacttgtttctttatccggcgctaagaaaaacaatgttatatacggcatggtcgtgttattacttatatgtggttgtatacctaagcttggcgcattagcaaatatcataccgctacctgtgttaggcggtgcgatgatagctatgtttggcatggtaatggcatatggtgttagtatattaggacatatcgattttaaaaatcaaaacaatttattaattatcgctgtatcagtaggattaggtactggtataagcgctgtaccacaagcatttaaaggtttaggtgaacaatttgcatggttgactcaaaacggaattgttttaggcgcaatctctgcaattattcttaatttcttttttaatggaataaagtataaacaaacggaagaaaatgtgaaataatataactaattaatttgaaaaatggaggctgtttttaatgtgggaaagtaaatttgcaaaagaatcattaacgtttgatgatgtgttattaattccagcacaatctgatattttaccgaaagacgttgatttaagcgtacaattatcagacaaagttaaattaaatattccagttatttctgctggtatggatactgtaactgaatctaaaatggcgattgctatggctcgtcaaggtggtttaggtgttattcataaaaatatgggcgttgaagaacaagcggacgaagttcaaaaagtaaaacgctcagaaaatggtgtcatttcaaacccatttttcttaacgccagaagaaagcgtttatgaagcagaagcattaatgggtaaataccgtatttcaggtgtaccaattgttgataataaagaagatcgcaacttagtaggtattttaacaaaccgtgacttacgttttattgaagacttctcgattaaaattgtagatgtaatgacgcaagaaaatttaattacagctccagtgaatacaacacttgaagaagcagaaaaaattctccaaaaacataagattgaaaagttaccattagttaaagacggacgtctagaaggtcttattactattaaagatattgaaaaagttatcgaattccctaatgcagcaaaagatgaacatggtcgtctacttgtagccgcagcaattggtatttcaaaagatactgatattcgtgctcaaaaattagtcgaagcaggtgtggatgtcttagttatcgatacagcacatggtcactctaaaggtgttatcgatcaagtgaaacatattaagaagacttacccagaaatcacattagtagcaggtaacgtagcaactgcagaagcaacaaaagatttatttgaagcgggtgcagatattgttaaagttggtattggcccaggttcaatttgtacgacgcgtgttgtagcaggtgttggtgtaccacaaattacagcaatttatgattgtgcaactgaagcacgcaaacatggtaaagctatcattgctgatggtggtattaaattctcaggagatatcattaaagcattagctgctggtggacatgcggttatgttaggtagcttattagcaggtactgaagaaagcccaggcgcaacagaaattttccaaggtagacaatataaagtataccgtggtatgggctctttaggtgcgatggaaaaaggttcaaacgaccgttacttccaagaggacaaagcgcctaagaaatttgttcctgaaggtatcgaaggacgtacggcttataaaggtgcgttacaagatacaatttaccaattaatgggcggtgtgcgtgctggtatgggttatactggttcacacgatttaagagaattacgcgaagaagcacaatttacacgtatgggtcctgctggtttagcagaaagccatccacataatattcaaattacgaaagaatcaccgaactactcattctaattaagataaaggagaacgacaaatatggaaatggcaaaagaacaagagttaatccttgtcttagactttggtagccaatacaaccaattaattacacgccgaattcgtgaaatgggcgtttatagtgaattacacgatcatgaaatttcaattgaagaaattaagaaaatgaatccaaaaggtattatcttatcaggtggtccaaattcagtttatgaagaaggttcatttacaattgatccggaaatatataatttaggaattccagtacttggtatttgttacggcatgcaattaactactaaattattaggtggtaaagttgaacgtgccaatgaacgtgaatacggtaaagcaatcattaatgcgaagtcagatgagttattcgctggcttaccagcagaacaaactgtttggatgagtcattctgataaagttattgaaattccagaaggctttgaagttatcgctgatagcccaagcacagactatgcagcaatcgaagataagaaacgtcgcatttatggtgttcaattccatccagaagtacgtcatacagaatatggtaatgatttattaaataattttgtccgtcgtgtttgtgattgtagaggtcaatggacaatggaaaactttatcgaaatcgaaattgaaaagattcgtcaacgcgtaggagaccgtcgtgtattatgtgcgatgagtggcggcgtagattcatctgttgtagctgtactattgcataaagcaataggtgatcaactaacatgtatctttgtagaccatggcttacttcgtaaaggtgaaggcgacatggttatggagcaattcggtgaaggtttcaacatgaatattattcgtgttaatgcgaaagatcgctttatgaataaattaaaaggtgtttcagatcctgaacaaaaacgtaaaatcattggtaatgaatttgtatacgtatttgatgatgaagcatcaaaactgaaaggtgtagacttccttgcgcaaggaacactatatacagacgtcatcgaatcaggtactaaaacagcacaaacaatcaaatcacaccacaatgttggtggattaccagaagacatggaattcgaattaatcgaaccaatcaatacattgtttaaagatgaagtacgtaaattaggtattgagttaggtattccagaacatttagtatggagacaaccattcccaggacctggtcttggtattcgtgtacttggagaaattactgaagataaactagaaatcgttagagaatcagacgcgattttacgccaagtgattagagaagaaggtcttgaaagagaaatttggcaatacttcacagtgttaccaaacattcaatcagtaggtgttatgggagactaccgtacgtatgatcacacagtaggtattcgtgcagtaacatctatcgacggtatgacaagtgacttcgcacgcatcgattgggaagtcttacaaaagatttctagtcgtatcgtaaacgaagtagatcacgtcaaccgcgtagtctatgacattacatcaaaaccaccaagcacaattgagtgggaataattatatataataaaaccacctgtttgcacgggtggtttttaatttgagtagttggaaaattacaataaggacggaaaaggggtaaggtgttctaagtttgcgttttaattcatcaataaggcaattttccgtgtttatttttatataaaatttcatattgtttaggatcttcttgttttaaatcataaattatagtttcgtctactattttttctaattcaagtgtattaaagctccagtcatttgttgttattataaatattttttggactgggttgttatttatatgattaattagcctaggagtatctgtttctattattagagcagattctacaggatagtaaatagcaaagtctccgtgataaattgtgtttctttcatagaggttaacctctaaggttaaattactcaatttgaagattgtgttttgagttatatttttaggaataattcgattatctactatttgttttaggttgcctattgaacgagtgtgtatcgtcccttttgtgtaatcggaattatttaaagctcttaaaacagttgttaatttatactcgttaacataaccctttactaaagccatccgtttatcgctacctataaaatctttcagttttttgttgaattcattattgttgtgcataatattttatcctttccattagttgattgttttcatttgttcaaatctctatccatttactcggttacagggctgtgtatttgcagagtaatattatgattgaaataaccaacgcgttccgtattcgttttgagtgacgcagctagctgcgataatagtgacatgtggcttataacacattgtgtaatttattgtgtgttttgtgatgtctaatattgattgcagattgttgtatatttcacttaaagggcatttatataaaaaaagaggccagatgacgtatcatctgaccttcagctaaaacgctgagaatatgtcattcttcaagagaatgaagccggaatggttaccgggaatttgtaaatcaattatatcagatgtaatattacaattcaattagaaaagaactttatctttaattgcttttcgatttcattcatgtcatcttctgaaattattatcgttccagtaggatcagaatcatttattttgcttatacgtcttttgcttattgttgtaattgctgatatattaacgtatgtatctttccctttgtgcttggaataaacacctatcactctatacagttcattagctttttgatttaagttagacaaaagctttttatcttctgtgctaagtttaatgtcaatttctctatatttttgggctaatgcttgtactttactactgatatcgataatctgtttttttaaatctgttgctgttagatttagcaccgattcgtttaacttcaaataatttttattacctttggaagaaagtggaactattgtaactgtttcttttcctttattgtctttgttatctaatattacacaaaaatgattaccagaaaactcacttccaatattactccctagttttacatataccactgttcctctactatatgatttataatatctttttttattgcttgtaacatcgctatgtatagcaattgaataaaactctagccaatgaggcatgtatataactttcatgtttttactgtcggattttgaataagcttgttttagttttttgtttgacgtatttaatttactatttgcttgattgatatttttagacattaaatagtgttctcctaatcaatttattcttctttatatcagcattattagcactgaaattaacatgaatggtacgaaaatagatgttactataaaaccaacaatttttattaggtggaactcatcaattttgtatttagcaaatttcgcaatgacctgctatttattcgctttttatagttcatgtatgtgtaaaaaagtctatattgaacatctaattataagcgaattcctaatgctaaaagcaatctaacttacttaaatattattatgagtttttattgaaattaaataaatttaaactatttcttagtctctccatatcgttggaagttggttctttatataatcagataaattagaatcttcaagtaatgtatctttaaaaagttcagtttctaaatcaactttaaaatttgctttaaaacatcatgttccatttttaaatgttgaacttctttgcgtaattttattaactctttttcatcactttttaaattatcttgatgattgaagggtccagtattttggtgttgttttatcgaatttgagataattgagggttttaaatcatactttcgtataatttcattcttaagcttaccatttttatataatctaaccatttgtaacttaaactctgaactaaatgttcttctttcttttgtcataataaaattgactactttcttaatttaacaatatctattctcatagaatttgttcaattaagtgtagacgattcactgacacatcataagtacgtaaggaattttgatcgttcattgttattgctttatgttttagggaatgtgctattgaaggggttaaagatgtttgaaatgtcttggtttcttgacttatatagttatgaaagagggcgttgtcctttatagcatttctgagattagaaatgctataaataaagtgattaagattttttgttttcatgtaatttaagaaatggatttgttttttgtgggttatttttaattctgttcttaaatggtttgaattttgcgattgcaaatatgatagctgcttcttttgacaaagtaatagaacctttttcttctggtaccatgataatcactccttgtgcaattggatttaaatattataaaataattttactatacaaaatatattgtgtaaatagtttcttattgttaccaaataatatgtttggaagcgttatgtaatgccaatcaacaccgaagttctcatgtcctctttccttttacgactacatatattgttaataatattgaaataataaactgatagtgataatatttatttaactgatccatgagagtaggaaccccatcatacgggaatttcgaaatcatgggttttttgttttaaaggattgatgcaatagataaagtagccattctaatatatggagtatttatcagctgaaaattaaatcagatatgggttttcttcattaaataatttttctataaggaaacagaggcaacgctactgtcacctctgcttgaaataattaggatgaaatactctgagtctaaagtccacacacaattcgctcaaatcctccaaacctccgactacatctccacccccccaaacaccaatacttaccaaagcattgatatgagtgccaatactggcaatgtgccttgtttgaaaaagatactaatattgcttgaaaggccaccataaatagcaacgccaatgatatacactaaaatagctgcgcatatttcttttggattactgctgataaacaaaccgtatattagcaaaactccgattaaaccgttatatacgccttggttcttcaaaagtaggttaatatttttgtctttcaatttatcgacgcttatattaaatgtctcgctagtctttttggaagttgtagcaatcgtttcaaggtacataatatagaaaaactctaatgccacaaatatgattaaaattgttgagatgatattcactataacgctcctttattattaaatattttcttgtaaaaatgattgcagtgtctgtggttgatcattgactaattgttggaaatcattggattcttggtctaatagtcctcttgctcctgcgtcgtacattgatgccaataatgcaccaaagcctttaggttcatcatacatttctgcaaatgtctctaatgaaacgggctcatatttaatttctgtgcctgatgcctcagataaaattgcagcaagttctttcatatcataactgtagcctgataataagtagcgtttgccccaagtatctggatttttaataatagcaatgacacctctagcaatatcatttctagtaatataattaatacgaccatcgccagctggataaatcagtttatgcatattcatcaattctggtaaatatggtttaagtggatccatgtacattgccattcttacatacgtatagtcaatgccacttgttgccaatagacgtgctgcataaccaaaataaggactcatatggaatggattattatgctgatctgcgtaataacctatgaaaatgatatgagcaacgccgctctgctttgccgcatatactaaattttccacttcaggaatacgtttgaatgatggatggataatacttggaataaacacaacggtatccattcctttaaatgcttctaccatgctttcttgattaaaataatctaattgtcgaacaggaacttttccgcgccaatcttctggaactttctcaacatttctaacaccaatgtgaaaatgatctatgtgatttgcaatggcttgatttgtaatatgtgtgcctaaatgacctgtagcacctgttaacataatattcattcacttcatctcctaatctttatatacataacataatacttatttgatggttttcaaaacatttgattttataaaaaattctaatctgtatttattgtcgacgtgtatagtaaatacgtaaatattattaatgttgaaaatgccgtaatgacgcgttttagttgatgtgtatcactaatatcattgaaaattttaatcaggtactacgacaatatgatgtctgttttgtgtctgaaagttttacagtttttaaaataaaaatggtataaagtgtgatttgtataaaaaagagtctcgacggataagaattgattaataacagttagcattttattaattaccttaacaatgattcaagtttagttaaatgaggtttaatttgaaaggggatagcgcctcaatataatgtaggtagattgttcatattacgtaattgaaaaatcaaatttaaatagattggggctaaaaattatgaaatttaaagcgatagcaaaagcaagtttagcattgggaatgttagcaacaggtgtaattacatcgaatgtacaatcagtacaagcgaaagcagaagttaaacaacaaagtgaatcagagttaaaacactattataataaaccaattttagagcgtaaaaatgtgactggatttaaatatactgatgagggtaaacactatttagaagtcacagtagggcaacagcattctcgaatcactttacttggatctgataaagataaatttaaagacggagaaaactcaaatatagatgtgtttatccttagagaaggtgacagtagacaagcaacaaattactcaattggtggcgttacaaaatcaaatagtgtgcagtatattgattatatcaatacgccaattttagaaatcaagaaagataatgaagatgtacttaaagatttttactacatttcaaaagaagacatctcattaaaagaacttgattatagattaagagaacgtgcgattaaacaacacggcttgtattcaaatggtcttaaacaaggtcaaattacaattacaatgaatgatggcacaacacatacaatcgatttaagtcaaaaacttgaaaaagaacgtatgggtgagtcaatcgacggcactaagattaataaaattctagtagaaatgaaataatactttctaacaacaaagcgctatgttgaatagtgcttgttatggaaatatatggaagttaagcgacgtactgttgcttagcttctttttttgaggggaaaagttacaaaactcacacaaacagtcgcaccacgcattatcttttgcttaaatagcttaatcatattttatgaatagttaaaaacaggttaatgtgaatatccgaatacagctcctataatatgggtgtatgattcaaattacgtaataaaacaatctaattataatagattggagcatacaactatgaaaatgaaaaatattgcaaaaataagtttgttattaggaatattagcaacaggtgtaaacactacaacggaaaaaccagttcatgccgaaaagaaacctattgtaataagtgaaaatagcaaaaaattaaaagcttattataatcaacctagtattgaatataaaaatgtgacaggttatatcagtttcattcaaccaagtattaaatttatgaatatcatagatggtaattctgttaataatattgctttaattggcaaagataagcaacattatcatacgggtgtacatcgtaatcttaatatattttacgttaatgaggataagagatttgaaggtgcaaagtactctattgggggtatcacgagtgcaaacgataaagctgtcgacctaatagcagaagcaagagttattaaagaagatcatactggtgaatatgattatgactttttcccatttaaaatagataaagaagcgatgtcattgaaagagattgattttaaattaagaaaataccttattgataattatggtctttacggtgaaatgagtacaggaaaaattacagtcaaaaagaaatactatggaaagtatacatttgaattggataaaaagttacaagaagaccgtatgtccgatgttatcaatgtcacagatattgatagaattgaaatcaaagttataaaagcataacacatatacttgatgacgaaataagttgaaattgaaatagagaggttaagtgacgatcaaacgttgcttaacttctttttaatgcttaaaaattatttcaaaggcacatagaaacgctatattaatctcatactcactcattattttttgcttaaattacttaataatacttcaataattgttaaaaggggtttaatgtgattatcttagaacgccatctataatgatgttgtatgattcaaattacgtaaaaagacaatcgaatataatatagattggagcatacaattatgaaaatgagaacaattgctaaaaccagtttagcactagggcttttaacaacaggcgcaattacagtaacgacgcaatcggtcaaagcagaaaaaatacaatcaactaaagttgacaaagtaccaacgcttaaagcagagcgattagcaatgataaacataacagcaggtgcaaattcagcgacaacacaagcagctaacacaagacaagaacgcacgcctaaactcgaaaaggcaccaaatactaatgaggaaaaaacctcagcttccaaaatagaaaaaatatcacaacctaaacaagaagagcagaaaacgcttaatatatcagcaacgccagcgcctaaacaagaacaatcacaaacgacaaccgaatccacaacgccgaaaactaaagtgacaacacctccatcaacaaacacgccacaaccaatgcaatctactaaatcagacacaccacaatctccaaccataaaacaagcacaaacagatatgactcctaaatatgaagatttaagagcgtattatacaaaaccgagttttgaatttgaaaagcagtttggatttatgctcaaaccatggacgacggttaggtttatgaatgttattccaaataggttcatctataaaatagctttagttggaaaagatgagaaaaaatataaagatggaccttacgataatatcgatgtatttatcgttttagaagacaataaatatcaattgaaaaaatattctgtcggtggcatcacgaagactaatagtaaaaaagttaatcacaaagtagaattaagcattactaaaaaagataatcaaggtatgatttcacgcgatgtttcagaatacatgattactaaggaagagatttccttgaaagagcttgattttaaattgagaaaacaacttattgaaaaacataatctttacggtaacatgggttcaggaacaatcgttattaaaatgaaaaacggtgggaaatatacgtttgaattacacaaaaaactgcaagagcatcgtatggcaggcactaatattgataacattgaagtgaatataaaataatcatgacattctctaaatagaagctgtcatcggaaaaacaagaagttaagtgacaacggtttacatgttgcttagcttcttttattatgcgtaatgatgtaaaaagacgaatattcatttgtttgtaaaagtggcatttctatgtcttaaaagtgacgaaacttcaaatgtgccaagtgttgaatcacatcaaaatcatttttatttaacgaacattatggatttcttaatttacttaacgatgattcaaatatagttaaacaaggtttaatgtgaatggagcaatacgccatctataataaagctgtatgattcaatgaatgtaatcgaacaaatctaataattacgaatggagcatacaactatgaaaataacaacgattgctaaaacaagtttagcactaggccttttaacaacaggtgtaatcacaacgacaacgcaagcagcaaacgcgacaacaccatcttccactaaagtggaagcaccacaatcaacaccgccctcaactaaaatagaagcaccgcaatcaaaaccaaacgcgacaacaccgccctcaactaaagtagaagcaccgcaacaaacagcaaatgcgacaacaccgccttcaactaaagtgacaacacctccatcaacaaacacgccacaaccaatgcaatctactaaatcagacacaccacaatcgccaaccacaaaacaagtaccaacagaaataaatcctaaatttaaagatttaagagcgtattatacgaaaccaagtttagaatttaaaaatgagattggtattattttaaaaaaatggacgacaataagatttatgaatgttgtcccagattatttcatatataaaattgctttagttggtaaagatgataaaaaatatggtgaaggagtacataggaatgtcgatgtatttgtcgttttagaagaaaataattacaatctggaaaaatattctgtcggtggtatcacaaagagtaatagtaaaaaagttgatcacaaagcaggagtaagaattactaaggaagataataaaggtacaatctctcatgatgtttcagaattcaagattactaaagaacagatttccttgaaagaacttgattttaaattgagaaaacaacttattgaaaaaaataatctgtacggtaacgttggttcaggtaaaattgttattaaaatgaaaaacggtggaaagtacacgtttgaattgcacaaaaaattacaagaaaatcgcatggcagatgtcatagatggcactaatattgataacattgaagtgaatataaaataatcatgacattctctaaatagaagctgtcatcggaaaaacaagaagttaagtgacaacggcctacatgttgcttagcttcttttgttatgttcgatgatttgagaacccgaattttcgatgggtccaaatatgacgtggaagagacctgaatttatctgtaaatccctatctatcgggtgtgaagcacaacgggatcagttttatttaacgaacattatagattccttaatttacttaataatgattcaatgattattaaacatggtttaatgtgaaaggtcaaatacgctaactataataaagctgtatgattcaatagacgtaagcgaacaaatctaataattacgaatggagcatacaactatgaaaatgacagcaattgcgaaagcaagtttagcattaggtattttagcaacaggaacaataacgtcattgcatcaaactgtaaatgcgagtgaacataaagcaaaatatgaaaatgtgacaaaagatatctttgacttaagagattactatagtggcgcaagtaaggaacttaaaaatgttactggttatcgttatagcaaaggtggcaagcattaccttatctttgataaaaatagaaaattcacaagagtacagatatttggtaaagatattgaaagatttaaagcacgtaaaaatccgggattagacatatttgttgttaaagaagcggaaaaccgtaatggcacagtgttttcatatggtggtgtcactaagaaaaatcaagacgcttattatgattatataaacgcaccaagatttcaaatcaagagagatgaaggtgacggtattgctacgtacggtagagtacactacatttataaagaagagatttcacttaaagaactcgactttaaattgagacagtatttaattcaaaattttgatctgtataaaaagtttcctaaagatagtaagataaaagtgataatgaaagatggcggctattatacgtttgaacttaataaaaaattacaaacaaatcgcatgagtgacgtcattgacggtagaaatattgaaaaaatagaagccaacattagataattcaatgaaatatggataatagtaaaatatggatagtatagaggagttaggcaacataagttgcttagcttcttttttgtgttggagagatgaaaatgaagcgtatcgatgaataataaaaacaccaataaaacttgtggaaatagttgatacttatagtcgcgcgttgtccttttcgtgacatgaaacaatgtggaaaacatagttaaattgagggaaagtgtgaatagttaaaaaagctgcgttaagtttaaaaaatagattaacgctgttaggattccattaattagcttaacattggttcaaaaatagttaaaaagaggttaattcatagcttagtattacgcttatataatgatagtagattgttcgtattacgtaattgaaataatcatataaaaatatattaagacaaaatttataaatagattgggagaatagtactatgaaattaaaaacgttagctaaagcaacattagtattgggattgttagctactggtgtaataacaacagaaagtcaaacagtaaaagcggcagaatcaactcaaggtcaacacaattataaatcgttaaaatactactatagcaagccaagtatagagttaaaaaatcttgatggtttgtatagacagaaagtgacagataaaggagtatatgtttggaaggatcgaaaagattattttgttggcttgcttggtaaagatattgaaaaataccctcaaggtgagcatgataagcaagatgcatttttagtcatcgaggaggaaactgttaatggaagacaatattcaattggtggtttaagtaagacaaatagtaaagaatttagtaaagaagtcgatgttaaagtaacaagaaaaattgatgaatcatcggaaaagtctaaagatagtaaatttaaaattactaaagaagaaatctcgttaaaagagttggactttaaattaagaaaaaaattgatggaagaagaaaaattatatggtgctgttaataatagaaaaggtaaaattgtagttaaaatggaagatgataagttttatactttcgaacttacaaaaaaactacaaccgcatcgcatgggtgacacgatagatggtaccaaaatcaaagaaattaatgttgagctagaatataaataatctttggacaagcagactagtaattgtagggaagttaagcgataacatattgcttagcttcttttttattttgttatgatgaaaaaaggagcgggtttatgatcaagtttttggaaaaacggttgatacttatagtcgcgcgttgtccttttcgtgacatgaaacaatgtggaaaacataattaaattgagggaaagtgtgaatagttaaaaaattagtattgtgttataaaaaataattaatactgttaggatttcattaactaacttaacgttggttcaaaaatagttaaaaagaggttaattcatagcgcagtatctcacttatataatgatagtagattgttcgtattacgtaattgaattaatcatataaaaatatattaagacaaatttataaatagattgggagaatagtactgtgaaattaaaaacgttagctaaagcaacattggcattaggcttattaactactggtgtgattacatcagaaggccaagcagttcaagcaaaagaaaagcaagagagagtacaacatttatatgatattaaagacttacatcgatactactcatcagaaagttttgaattcagtaatattagtggtaaggttgaaaattataacggttctaacgttgtacgctttaaccaagaaaatcaaaatcaccaattattcttattaggtaaagataaagagaaatataaagaaggcattgaaggcaaagatgtctttgtggtaaaagaattaattgatccaaacggtagattatctactgttggtggtgtgactaagaaaaataacaaatcttctgaaactaatacacatttatttgttaataaagtgtatggcggaaatttagatgcatcaattgactcattttcaattaataaagaagaagtttcactgaaagaacttgatttcaaaattagacaacatttagttaaaaattatggtttatataaaggtacgactaaatacggtaagatcactatcaatttgaaagatggagaaaagcaagaaattgatttaggtgataaattgcaattcgagcgcatgggtgatgtgttgaatagtaaggatattaataagattgaagtgactttgaaacaaatttaaagtaagtaatcaatgactctaaagtaataaatttgaagcagcttaacgatgaaatgttgaatagatacgtacaccttacattaaggagcgtatttaaaacaaccttgtcgttaggcttttttttacgttttataacgcaggttatgagtgagcatactaaaaatttacattgctcttgaaagtgatgcccattgaatattaattagctcttcattaacaatgatttaagtttaattaaacgagtgttaatgtcagtctgtctcaatgccctttataataaaggtgtattattcaaattacgtaataaaagcaatccaatatattaagattggagcacatgaatatgaaatttacagtgatagctaaagcgatatttatattaggaatattaacaacaagtgtaatgataacagaaaatcaatcggttaatgcaaaaggaaagtatgaaaaaatgaaccgtttatatgatacaaacaagttacatcaatactattcaggacctagttatgagttaacaaatgttagtggccaaagtcaaggttattatgactctaacgttttgctttttaaccaacaaaatcaaaagttccaagtgtttttattgggaaaagatgaaaataaatacaaagaaaaaacacatggtttagatgtctttgcggtaccagaattagtagatttagatggaagaatatttagtgttagtggtgtaacaaagaaaaacgtaaaatcaatatttgagtctctaagaacgccgaacttactagttaaaaaaatagacgataaagacggtttttctattgatgaatttttctttattcaaaaggaagaagtgtcattgaaggaacttgattttaaaataagaaaactgttgattaaaaaatacaaactgtatgaagggtcagctgataaaggtagaattgttattaatatgaaagatgaaaataagtatgaaattgatttaagtgataaattagatttcgagcgtatggcagatgtcattaatagtgaacaaattaaaaacatcgaagtgaatttgaaataatcaatgatatatatagaatgaaagcttaagaagcggtttaataatcccatgtttaatgattttgatacgtgtttttataataaaaacatatcgaacattgactacgttattaagctgcttttttgtacactttataaccaatagcttaagatttaaaactaatcggaaagaacaatgattcaccaaaaaaatatttatgttgctattaaaaatcagttaatacgaatgttaaaatacgtttgattttcattaataatgattcaagtttatttaaatgagcgttaatgtcagtctgttttgatgcaccttataataaagacagatagttcaaattacgtaataataacaatccaatacattaagattggagcaaaaaaatatgaaattaacaacgatagctaaagcaacattagcattaggaatattaactacaggtgtgtttacagcagaaagtcaaactggtcacgcgaaagtagaacttgatgagacacaacgcaaatattatatcaatatgctacatcaatactattctgaagaaagttttgaaccaacaaacattagtgttaaaagcgaagattactatggctctaacgttttaaactttaaacaacgaaataaagcttttaaagtatttttacttggtgacgataaaaataaatataaagaaaaaacacatggccttgatgtctttgcagtacctgaattaatagatataaaaggtggcatatatagcgttggcggtataacaaagaaaaatgtgagatcagtgtttggatttgtaagtaatccaagtctacaagttaaaaaagttgatgctaaaaatggcttttcgataaacgagttgttttttattcaaaaggaagaagtatcattgaaggaactggactttaaaataagaaaactcttaatcgaaaaatatagattgtataaaggaacgtctgataaaggtagaattgttatcaatatgaaagacgaaaagaagcatgaaattgatttaagtgaaaaattaagttttgaacgtatgtttgatgtaatggatagtaagcaaattaaaaatattgaagtgaatttgaattagttcgagttaatagcataatagcttaagaagcggcttaacgacaaaatgtgaattggcatttgtgtccttatataaggaactgtgttaaatacattactgttgttaagttgtttttgtaattcaaagagcagaacagagtaacatcatcagttgtagtaaacgataatccggtaaaacaactaaatgaaataatgaaagtcatttaacctgaacattaaaatatatttgtttttcattaagaataattcaagtatatttaaatcgaggttaattatcgtatgaaacgatgcacgttataataaaaatgtatgattcaaattacgtaatgaaaacaatccaatatattaagattggagcaaataaatatgaaatttacagcattagcaaaagcgacattagctttaggaattttaacaacaggaactttaacaacagaagttcattcaggtcatgcaaaacaaaatcaaaagtcagtaaataaacatgacaaggaagcattataccgatactacactggaaagactatggaaatgaaaaatattagtgctttgaaacatggtaaaaacaacttacgttttaagtttagaggtattaagattcaagttttactgcctggaaatgataaaagtaaatttcaacagcgtagttatgaggggttagatgttttctttgttcaagaaaaaagagataagcacgatatattttatactgttggtggtgtaatacagaataataaaacatctggagttgtcagtgcaccaatattaaatatttcaaaagaaaagggtgaagatgcttttgtgaaaggttacccttattacattaaaaaagaaaaaataacactaaaagaactggattataagttgagaaagcatctaattgaaaaatacggactttataaaacaatctcaaaagatggtagggtcaaaattagcttgaaagatggcagtttttataaccttgatttaagatctaaattaaaatttaaatatatgggggaagtcatagaaagcaaacaaattaaagatattgaagttaacttaaagtaaatcattacgaataattaaaagtaattgaagcggcttaacggtgaaatgtaaattggtgcgcatagcttatacaaaaaggatgcatcaatcgatatcgtcgttaagccgttttggtttgtgtgtcatgaatcctatcccaatctccataaaggtaaaatttccaccaccaacatcaaaattctccacatcgcaacataaccaaatgttataataaatctattacacaaagagataaattacttattcaaaggcggaggaatcacatgtctattactgaaaaacaacgtcagcaacaagctgaattacataaaaaattatggtcgattgcgaatgatttaagagggaatatggatgcgagtgaattccgtaattacattttaggcttgattttctatcgcttcttatctgaaaaagcggaacaagaatatgcagatgccttgtcaggtgaagacatcacgtatcaagaagcatgggcagacgaagaataccgtgaagacttaaaagcagaattaattgaccaagtcggttacttcattgagccagaagatttattcagtgcgatgattcgtgaaattgaaacgcaagatttcgatatcgaacacctggcgacggcaattcgtaaagttgaaacatcaacattaggtgaagaaagtgaaaatgactttatcggtctgttcagcgatatggatttgagttcaacgcgactaggtaacaatgtcaaagaacgtactgctttaatctctaaagtcatggttaatcttgacgacttaccattcgttcacagtgacatggaaattgatatgttaggtgatgcatatgaattcctaattgggcgctttgcggcgacagcgggtaaaaaagcaggcgagttctatacaccacaacaagtatctaagatactggcgaagattgtcacagacggtaaagataaattacgtcacgtgtatgacccaacatgtggttcaggttcactgttgttacgtgttggtaaagaaacacaagtgtatcgttatttcggtcaagaacgtaacaatactacatacaacttagcacgcatgaatatgttattacatgatgtgcgttatgagaacttcgatatccgtaatgatgacacattggaaaacccagcctttttaggcaatacatttgatgcggttattgcgaacccaccgtatagtgcgaaatggactgcagattcaaagtttgaaaatgacgaacgattcagtggttacggcaaacttgcgcctaagtctaaagcagactttgcctttattcaacacatggtacattacctagacgatgaaggtaccatggccgttgtactcccacatggtgtattattccgaggtgctgcagaaggtgtcattcgtcgttatttaattgaagaaaagaactacttagaagctgtgattggtttgccagcgaatattttctatgggacaagtattccaacatgtattttagtatttaaaaaatgtcgccaacaagacgacaacgtactatttatcgatgcatccaatgattttgaaaaaggaaaaaatcaaaatcatttaagcgatgcccaagtcgaacgtattatagacacatataagcgtaaggaaacaattgataaatatagctacagcgcgacactacaagagattgccgataacgattacaacctaaatataccgagatatgtcgatacattcgaagaagaagcaccgattgatttagatcaagtccaacaagatttgaaaaatatcgataaagaaatcgcagaaattgagcaagaaatcaatgcatacctgaaagaacttggggtgttgaaagatgagtaatacacaaaagaaaaatgtgccagaattgaggttcccagggtttgaaggcgaatgggaagagaagcagttaggggatcttacagatagagtaattaggaaaaataaaaacttagaatcgaaaaagcctttaacaatatccggacagttaggtttaattgatcaaacagaatattttagtaaatcagtttcgtcgaaaaatctagaaaattatacactaataaagaatggagaattcgcgtataacaaaagttattctaatggatacccattaggggctattaaaagattaactagatatgatagtggtgtattgtcctctttgtatatttgtttttctattaaaagtgaaatgtctaaagacttcatggaagcatattttgattcgacacactggtatagagaagtttctggaattgcagttgagggtgcaagaaatcacggattattaaatgtttctgtgaatgatttttttactattctaattaaatatccaagtttagaagaacagcaaaaaataggcaagttcttcagcaaactcgaccgacaaattgaattagaagaacaaaagcttgaattacttcaacaacagaaaaaaggctatatgcagaaaattttctcacaggaactgcgattcaaagatgagaatggtgaagattatccagattgggaaaatagcaaaatagaaaaatatttaaaagagagaaacgaacgttctgacaaagggcaaatgctttcagtaactataaatagtggcattataaaatttagtgaattggatagaaaagataattcaagtaaagataaaagtaattataaagtagttaggaaaaatgatattgcatataattctatgagaatgtggcaaggggctagtggtaaatcaaattataatgggattgttagccctgcatatactgtgctttatccaacacaaaatactagctcattatttattggatataagtttaaaacacatagaatgattcataaatttaaaattaattcacaaggattaacatcagatacatggaacttaaaatataaacaattaaaaaatataaatatagatatacctgtattggaggaacaagaaaagataggtgatttctttaaaaaaatggatatattgataagtaaacagaaaatgaaaattgaaatattagaaaaagagaaacaatcctttttacaaaaaatgttcttataactttgataaatacatagattgcataagaataaaatttgtataatttaacataaaagttgtaaaagtaaagtgaattaaaaacgaacattaaatttaggcactgtgaaagcgcagtgtcttttttgtgtcgaaattgtgtacagaataagtagttaaataaagattaagttgagataaagtgttattcgtaaataaaagagagtagatcgataggaattgaatgatattagttaactatttattaaattacttaataatgattaatttttagttaaagtaagtttaatgtgaagcacgaccattgctcattataatgaatgaggattgttcgtattgcgtaatagaataaatcaaatagactaaaaattgggagcatagaattatgaaattaaaaaatattgctaaagcaagtttagcactagggattttaacaacagggatgattacaactactgctcagccagtaaaagcaagtacattagaggttagatcacaagctactcaagacttgagtgaatattataatagaccgttctttgagtatacaaatcagtcaggatataaagaggaaggaaaagtgacgtttactcctaattatcaacttatagatgtaactttaactgggaatgaaaagcaaaattttggtgaagatatttctaatgtagatatatttgttgtaagagaaaattctgatagatctggtaatacagcttcaattggtggtattactaaaacaaacggttcaaattatattgataaagtaaaagatgtaaatttaataattactaaaaacatcgatagtgttacatcaacgtcaacatcatctacatatacaattaataaagaagaaatttcattaaaagaacttgattttaaattaagaaagcatttaattgataaacataacctttataagacagaacctaaagacagtaaaattcgaattactatgaaagatggtgggttctacacatttgaattgaataaaaagttacaaacacaccgtatgggtgatgttattgatggcagaaatatagaaaaaattgaagtgaatttataaaattattcgagggagcatatcatgagggaaaattttaagttacgtaaaatgaaagtcggtttagtatctgttgcaattacaatgttatatattatgacaaacggacaagcagaagcatctgaaaatcaaaacgctttaatctctaatataaatgtagacaatcaggaaaaacagaataatgtaaatcaagctgttcagcctcaaaataatactaatgaaacatcaaaagtaccggctaattttgtcaaattgaatgatattaaaccaggtgatacttctatacaaggaacaactttaccaaatcaatttatactattaactattgataaaaaagatgtgagctcagttgaagattctgacagcagctttgttatgtctgataaagatgggaattttaagtatgacttaaatggtcgcaaaattgttcataatcaagaaattgaagtgtcttcatcagatccctatttaggtgacgatgaagaagatgaagaagtagaagaaacttcaactgaagaagttggtgctgaggaagaaagtacagaagctaaagctacatatacaacaccgcgatatgaaaaagcgtatgaaataccgaaagaacagctaaaagaaaaagatggacatcaccaagtttttatcgaacctattactgaaggttcaggtattattaaaggccatacctctgtaaaaggtaaagttgctctatctattaataataaatttattaactttgagacaaatgctaatggtggtccaaataaagaagaagcgaaatctggatcagaaggaatctggatgcctattgatgacaaaggatactttaattttgacttcaaaacgaaacgtttcgatgatttagagttaaagaaaaatgatgagatctcattaacatttgcacctgatgacgaagatgaggcattgaagtcattaattttcaaaactaaggtaacgagtttagaagatattgataaagcagaaactaaatatgaccatactaaagtggaaaaagtaaaagtattgaaagatgttaaagaagatttacatgtagatgaaatttacggaagcttatatcatacagaaaaaggtaaaggtattcttgataaagaaggtactaaagtaattaaaggtaagactaaattcgcaaatgcagttgtgaaggtagactctgaactaggtgaaggtcaagaattccctgatttgcaagtcgatgaaaaaggtgaattcagctttgatgtagatcatgctggatttagattacaaaatggagaaacactaaacttcacagtagttgatcctattacaggtgaattattaagtggaaattttgtttctaaaaacatagatatttatgaatctcctgaagaaaaagcagatcgtgagtttgatgaaagaatggaaaacacacctgcatatcataaattacatggtgataaaattgtcggctacgatactaacggattcccgattacctggttttatccattaggtgaaaagaaagttgaacgtaaggcaccaaaattagaaaaataattaaataaaacagcttaatgatgtaatgaaattagtgagttaatcactgacttctacgtcattgagctgttttttgtgctttgttacaaagcattattgaatttattttacgtgttcatattttgaaacatcaaagccgtcttgtttagctttgttgataatgtctttgattgaatgtagtcctttatcggcgaagtatgatcttaagttgtcttttgtagcttggtcagcattcttatctaataacacatcaatataacttaattcatgttctaagaagtttgcatcatcatgtagtacgagtccattttgagaataaactttcgcatctgcttgattaccatatccaacaacgccagttgctaaaacacctaccattgccgtagctactaaaacctttttaaatttcatatctatcactcctctaaaaattgtaactccatcataacactgaatattaagaaaattacgtttattaagtcgatttaataatttttaataaatagttaaagtgacaaatattgtttaaatgcaattaatctttaatacgatgcttgaggatttttcctaataaaaccttgatttcaaaaagggtttaaatcaaatgaaacaataataaaaaaatgacgcaatataataataagtacaaatttaattaagaaattaaattgattgtatatgtatattttggtaacgtaaaagagaaatatacaaaataattaattatttatatgaaaagagaatataaatgaagtataaaacagagagacgtgaagcgatgggatatttaaaaaggtttgcattgtacataagcgttatgattttaatatttgcgatagcaggttgtggcaaaggtaatgaaacaaaagaagattcaaaggaagaacaaatcaaaaagagctttgcgataacattagatatgtatccaattaagaatctcgaggacttatatgacaaagaaggatatcgagatagcgaatttaaaaaaggtgacaaagggatgtggacgatatatacagatttcgccaaaagtaataaaccgggtgaattggatgatgaaggtatggttttaaatctggataggaatactagaaccgctaaaggccattattttgttactacattttaccggaatggtaaactaccagatgaaaagaattataaaattgaaatgaaaaataataagattattttattagatgaagtaaaagatgataagctcaagcagaaaatagaaaactttaaatttttcggtcaatatgcaaatcttaaagaattgagaaaatataataatggtgatgtttcaattaatgaaaatgttcctagttatgatgttgaatacaaaatgagcaataaagatgaaatagttaaggaattaagaagtcgttataatatttcgactgaaaaatcacctatattaaaaatgcatattgatggggacctgaaaggcagttctgtaggttatagaaagttagaaattgacttttcaaaacgtgaaaacagcaaattatcagtcattgaatttttaagttataaaccagcgaaaaaatagtattgataaggaatattagggtgtgaaaaaatgcgatatctaaaaaagcttgcatggttcataagtgttattattttgggcatttttataataggttgtgatagttcaagcgatactggggaaaaagcaaaagaagattcaaaggaagaacaaatcaaaaagagctttgcgaaaacattagatatgtatccaattaagaatctcgaggacttatatgacaaagaaggatatcgagatagcgaatttaaaaaaggtgacaaagggatgtggatgatatatacagatttcgccaaaagtaataaaccgggtgtattagataatgaaggtatgattttaaatttggatagaaatacacgtacggccaagggatattattttgtagatactatatatgacaatcatgaaaactcttatagtaaaaattatagagttgagatgaaaaacaataaaattattttattagacaaggtggaagatcaaaaacttaaagaaagaatagaaaactttaaatttttcggacaatatgccgatttcaagagtttgaaaagttacaacaatggcgacgtttcaattaatagtaatgttccaagttatgacgcgaaatttaaaatgagtaataaagatgaaaatgttaagcaattaagaagtcgttataacattcctactgaaaaagctccaatattaaaaatgcatattgatggggacttaaaaggcagttccgttggatataaaaagttagaaatagacttttcaaaagaagaaaatagcgaattatcagtagtcgattcattaaattttcagcctgccaaaaaaaataaagatgatgaatgatagggaggatgtgaaacaatgtggtcaataaaaagaattggaatgtacacaaatgttataattttgagcgtttttataataggttgtgatagttcaagcaataatgcagaaaatcaaagagaagactcaaaagaagaacaaatcaaaaagagctttgcgaaaacgttagatatgtaccctattaagaatctcgaggatttatatgacaaagaaggatatcgtgatggtgagtttgaaaaaggcgataaggggacgtgggtattgtattcagctatggtatcacaaccaaaaggcgagagtttaaaatcacgaggaatgatattaaagttagatagaaataagagaactgctaaaggaagttatattattagagaattgaaagaagataaaaatcatgatgttcaaaaaaatgaaaagaaatatccagtgaaattggtgaataataggatagttttgataaaagatgttaaagacaaaaagttaaaaaaatgaaatagagtcgtttgaattattttcacaatatggaaactttaatcattttgatcggaatgagattactaatatttcatataatcctaatgctcccaattactctgcagaatataaaatgaagaaaaatgacagaaacattcaacagttgaaaaagagatttaatctaaaaactagcaagacaccaaaattattgtttaagggatctggagatataaaggggtcttctgtaggatataaggaaatagaaatcatatttagtagaagtaaagaagaaagcatttattatgttgacagcgttgagttcgttccaagtaacaaaataacaaaaagttgatattagtcaacaaaagcaaatattgagaataaagagagttgtgaaatgatgggttatttaaaaagacttgtattgtatatagttattatggttatgagtgtttttataataggttgtgataaatcaagcgatactgcagaaaaatcaaaagaagactcgaaagaaacacaaatcaaaaagagttttgcgaaaacgttagatatgtattcaattaagaatctcgaggaactatatgacaaagaaggctatcgagatggcgaatttgaaaaaggtgacaaagggatgtggacgatatatacagatttcgccaaaagtaataaaccgggtgaactaagtaatgaaggcatggtcttgtacttagatagaaacacacgcacagctaaggggtactactttgtcaggacgttttatcgcaaggataaattacctgatagaaaaaattataaagttgaaatgaaaaataataaaatcattttattagataaagtagaagataaaaagcttaaacaaaaaatagaaaattttaaatttttcagtcaatatgcaaatcttaaagaattgaaaaactacagcaatggtgatgtctcaattaatgagaatgttccaagttatgacgtgaaatataaaatgagtaataaagatgaaaatgttaagcaattaagaagtcgttataatattcctactgataaatcaccggtattaaaaatgcatattgatggtaatttgaaaggaagttccgttggagataggaagttagaaattgatttttcgaaacgtgaaaatagccatttatcagtaatagattctttggattaccagccagcgaaaactaataaagatgatgaataatgaggatggtgtgtaacaatgaagtctataaaaaggattggattgtgcataagtctgttgattttaagcatttttgtaacatcttgcgatggtgataataagatcactggagattcaaaagaaacacaaatcaaaaagagcttttcgaaaacgttagatatgtatccaattaagaatctcgaggacttatatgataaagaaggataccgtgatggcgaatttaaaaagggcgacaaaggaatgtggactatatatacagattttgctaaaggcaataaatcagacgaattggatgatgaaggtatggttttaaatctggatagaaatactcgaacggctaagggatattattttgttaagaaattttatgaaaaggataaattacctgatagaaaaaattataaagttgaaatgaaaaataataaaattatcttattagacaaggtagaagatccaaatctaaaaaagagaatagaaaactttaaatttttcggacaatatgcaaattttaaggatttggaaaattacaacaatggcgacgtgtcaataaattggaatgttccaagttatgacgtggaatataaaatgagcaataaagatgaaaatgttaaacaattaagaagtcgttataacattcctactgataaagctccaatgttaaaaatgcatattgacggggacttaaaaggtagttctgttggatataaaaggttagaaatagatttttcaaaagaaggtagggatatttcagtcattgattatttaagttataagccagcgaaaaaatagtactgataattaaatattagggtgtgaaggaatggaatatctaaaaaggcttgcattgttaataagtgttattattttgaccatttttataatgggttgtgatagtcaaagcgatactgcagaaaatccaaaagaaggttcaaaagaagcacaaattaaaaagagtttttcgaaaacgttagatatgtatccaattaagaatctcgaggatttttatggcaaagaaggatatcgagatggcgaatttaaaaaagatgataaaggtacttggctaattagatccgaaatagttaaacagccaaagggcaaagtgatgaaaacaagaggtatgcaattatatattaatagaaataccgaaacagccaaaggtttctttgttttgaaagaaataagtgaaaataataatcgtgtaaataaagataaggaggaaaaatacgaagtgaaaatggtaggaaataaaattattcctactgaacaaattaatgacgagaaaataaaaaaagaaattgaaaacttcaagttttttgtgcaatatggaaactttaaaaatttcgaaaaatacaacaatggtgagttttcatataatcctgaagcaccaatttattcggctaaatatcaattacacaacgatgattacaatgtaaggcaactacgtaaaagatatgacatttcaacaaaagaaacaccgaagttacttttgaaaggtggaggagatttaaaaaattcctcagttggtcaaaacgatattgaatttacttttgttgaaagaaaaggtgagaatatttattttaacgatagtgttgaattcataccaagtaagtaaagttaaattaaaatgtgtggttagatgaaatgatcaaatatcaaaaaatgtgcaaagagatgtgacaagatgaagtgttttcagaaattatacatatttatattaattttaatcgtattaatggcaggatgcgaaagtaataagatcactggagattcgaaagaaacacagatcaaaaagagctttgcgaaaacattagatgtataccctacgaaaaatctagaagatttttatgacaaagaaggatatcgagatggcgaatttaaaaagggtgacaaagggaagtgggttattagatctgaaatgacaacagaactgaaaaatgaaaatatggtatctaaaggtatggtcatacgtttaaatagaaatagtagaacatgcactggtgaatattttgtcaggatagttaaagaagacagtgagggcaaggtatatagtgatgaacgaaaatatccagtgaaaatggaaaataataaaatcattacattaaaaccaatcgatgatgaaaaagtaaaaaaagaaattgaagaatttaaattcttcgtacaatacgggaatttcaaagaattggaaaactataaagacggagaagtgacatataacccagaagcaccaatatactctgcacaatatcaattgaaaaatagtgattataatgtagaacaactacgtaagcgatataatataacgacgaaaaaagcgcctaaattattattgaagggttcaggtaatttaaaaggctcatcagttggatataaaaatattgaatttacctttgttgaaaataaggaagaaaatatttacttcacagatagtattaatttcaacccaagtgaggataaataagtatatttagtattacaaaaacgttagaaaaattaataataaagttaaattaacaaactgtattaaattcatatagtcagttttgtttgatgacatgatagtagaaaaattattattttaataggttgtatgaactatacaaatatttataaaaattaaaacagagagatgtgaaatgatggggtatataaaaagaatggctttatacatgagtgtatttcttttaatcatttttattgttggatgtcgaaatatgaaagatgaacagaaaaaagaagaacaaacaaataaaacagattcaaaagaagaacaaatcaaaaagagttttgagaaaacattagatatgtatccaattaagaatctcgaggagttatacgacaaagaaggataccgagatggcgaatttaaaaagggtgataaagggatgtggacgatatatacagatttcgccaaaagtaataaacaaggtggattgagtaatgaaggtatggtcttatacttagatagaaatacacggactgcaaagggacattattttgttaagacattctataataagggcaaattcccagatagaaaaaattataaagttgaaatgaaaaataataaaattatcttattagataaagtagaagatacaaatctaaaaaagagaatagaaaactttaaattttttggacaatatgcaaaccttaaagaattgaaaaactacaacaatggtgatgtctcaattaatgagaatgttccaagttatgacgcaaaatttaaaatgagcaataaagatgaaaatgttaagcaattaagaagtcgttataatattcctactgataaagcaccggtattaaaaatgcatattgatggtaatttgaaaggaagttctgtgggttataaaaagttggaaattgacttttcaaaaggtggaaaaagcgatttgtcagtaatagattctttgaatttccagccggcgaaggtagatgaagatgatgaatgatgaggatggtgtgtaacaatgaagtctataaaaaggattggattgtgcattagtttgttgattttaatcatctttgttacatcttgtgatggtgataataagatcattggagattcaaaagaagaacaaatcaaaaagagctttgcgaaaacgttagatatctaccctattaagaatctcgaggatttatacgacaaagaaggatatcgagatggcgaatttaaaaaagatgataaaggtacttggctaattagatctgaaatgaaaatccaattaaaaggagaaaatctggaatctagaggagcagttttagaaattaacagaaatactagaacggctaaagggcattatattgttagagaagttgttgaagatagcgatggaatgacacacaatcatacaaaaagatatcctgtgaaaatggaaaataataaaatgattccattaaaaccaatcgatgacgaaaaagtaaaaaaagaaatcgaagaatttaacttctttgtacaatacgggaatttcaaagaattggaaaactataaagaggacgaagtgtcatataacccagaagtaccaatttactctgcaaaatatcaattgaaaaacagtgattacaatgttgaacaattaaggaagcgatataatatcccgacgcaaaaagcgcccaaattattattgaaaggctcaggtaatttaaaaggttcatcagtcggatataaaaatattgaatttacctttattgaaaacaaggaagaaaatatttacttcacagatagtatctactttaatccaagcgaggataaataaatataattactaatataaaaaataacgttagaacatttaataataaagttaaaatgaattacatgtattaaattgaataagttagttttgtttgataacataaaagttgaataatcactattttaataagttgtatgaaatattcaaatgtttataaaattaaaacagagagatgtgaaatgatggagtatataaaaaaaattgctttgtacatgagtgtattacttttaatcatttttattgggggatgtggaaatatgaaagatgaacagaaaaaagaggaacaaacgaataaaacagattcaaaagaagaacaaatcaaaaagagttttgcgaaaacgttagatatgtatccaattaagaatctcgaggatttatacgacaaagaaggatatcgagatggtgagtttaaaaaaggcgataaaggtacgtggactatacttacaggtttttcaaaaagtaacaaaccaggagtattagatgatgaaggcatggtgttatatcttaatagaaatgccaaaaaggcaacaggttattattttgtaaataaagtttatgatgatattagcaaaaatcataatgagaaaaaatatcgtgttgaactaaaaaataataagattgttcttttggataatgtagaagacaaaaaacttaaacaaaaaattgaaaattttaaattttttagtcagtatgctgattttaaagatttaaaaaattatcaagatggaaatataacaactaatgaaaacgtaccgagctatgaagcacaatataaaatgaacaatagtgataaaaatgtaaaaaaacttagagaaatttatccaattacaactaataactctccaaatctaaaattatatatagatggtgatataaaaggaagctcagtaggatataaaaaaatagaatataaattttcaaaagataaaggtcaagagacaacattaagagattatttgaattttggaccgtctgaaggtgagaatgttgagtaggaagtataaaatagatttaaaagcaattaatcaaaatactgagtctacaagtgctatttcgaaagcgtcatacgaagttgagaatgctaataataatggtctatcaaaaagagacgtgattaatcaatttaatgatttgaaaaaaatgaaaaaattcccttctaatcttgaatatgttgatagttacactgattctcttactggagtaacaacttctgcttttttaaataaagatacaggcaaagtaactctcgggatgactgggactaatttacaagacgaagcctttaaaaagttaaaagaaggtgaattttcaagacaaaatgttaccaatgctttggaaacagttaaagatggatatgcagatcttaaaatattatattctcctgcatctgatcaaaactatagatatgcgaatacacaagaatttataaataaaataaaaagtaagtatgacattgattttattactggacattcactaggtggaagagatgcggtagttctaggaatgagtaatggtattccgaacattgtggtttataatccagctcctatttctataactagtttgaatcctaattccccagatggaaaacgtttattagaattatataaaaattataaaggtaatattactaggtttgttgcagaaaatgatgcattgacagaaaatctgaagaaatataagcattatgtttttttcggtaatgataaagtctttaaaaatggtaaaggtcatgaaatggaaggctttctgaccgaagaagaacaaaaagctataaaaaaagaacttaaaaaactacaaggttatgcagaagaaaataataagtcatttgtaaagaattcaaataatgctatctctaaattagctagtatagaattacttagagcaaatatgatgactacaaatggaggaggattatcttcttcgcagcaaaaagttttagaaagtttaacagctttaacaattgcgcagtcattcagtcaactgatagacgatgaaattaatcaaatcaaaaaaatgtataatgaaaagaaaaagaaatttggaaaaaattgggaagacgctcaaaaagctggaaaagctgtaggtgaagatttgagtgtaaatggagttctcaatgctttagatgaaggtcaagtgaatgaaagtagtatggtaagagaacctgaacaaatgatatctgcaaaagaaagacaactttcaacgatagggtcttctgtatcaaattatattatgagagttagactcagtattaatgaaatcgttgataaagatcaagtgcttgcatcacaaataggtggattactatgatgtttaatcaaattaataataaaaatgaattagaagaatcatatgaatctgagaaaaaacgtatagagaatgaactgcaaaatttaaatgaacttaggcatagaactcgaaaagaaaatgagcgtagttatgatgtttttcaatatttgaagcacgaaatgaattatagtgaagatgcccaaaggaaaatgacgagaaatatagaagcgtatgagcaagaaatcaatgagataattagaaagcaagaatggaaattagaagaatataaagaagacttaaaaaagtcttatgaaaagcagttagataagctaagtgactgataatttggaggagattaaatgactctaatagaaccagatatgaccttaagaatgccagatataagtactacagtagaaacacttaatctcatatctaaaatggaagcgcaaaaagaaaatattcgcacagttattgcacctgaacataagcataaatacaaagatattgaaaacggattaaaaggtgaagaaaaagtattaattgaacaaatggcgcaacattgcgaagcttttaaagctaattttaaaggtgcagctcaaggagattgggttaaaagtgccatgtctgagatagacagcattaaggatgacctgaaaaaaattaatagctaaactacatatcatactactaaataaagcgaccaatgttcagtatattcacaactgacactaggccgcttctttttaatttatattattcccatgtaaagtaattcgaaccgaatcgaaatatcacactctcaattgtaaaaaaacaacttaaattactgtcccgcattaaacatgaccacattcgtaacagcaacaataaaaatcctcaagtactaaaagctatgatcactttatcaaaatcaacgcaagttaacctctcccgaactacccgttactcatcaccttcaccttacaaaccataaagcgctgcagttaagtattgaatggcatagccaattgaaatgaaaatagcaatcgttataatagcactgccaatggtatataaagtatgtttcgtagataatccttcagtctttgaaccaaaaacactgagtagaataaatgcaataccagtaacatataaaactaaaatgacaaataacatgtttatacacctcgattctctttcgtgagatatatctttgtctccattataaagtaaagcgctcaataatttaattaagtatactatttttttattatcgaagattgcgaaagaggaaacgctcctatataatgtaaaacggaattattcctatttacaaataaattgaagtgagggtatatatatggctaaaattccagttacggtattaagtggttatttaggctcggggaagacaacgttgttaaatcatattttacaaaatcgagaaggtcgacgtatcgcggtaattgtaaatgatatgagtgaagtaaatatcgataaagatcttgtcgcagatggtgggggactatcgcgtacagatgaaaaattagtcgaactttctaatggttgtatctgttgtacacttagagacgatttattaaaagaagttgagcgtttagtgaaaaaaggtggcatcgatcaaattgttattgagtcaacagggatttcagagccagtacctgttgcacaaactttctcatatattgatgatgaacttggcattgatcttacagcgatttgccgtttagatacaatggttacagttgtggatgctaaccgcttcgtacatgacatcaactcagaagatttattgatggatcgtgatcaaagcgttgacgaaacagatgagcgttcgattgctgatttattaattgaccaagttgaattttgtgatgtattgattattaataaaattgatttaattagtgaagaagaactagcgaagttagaaaaaatgttaagcgcattgcaaccgactgctaaaattattaagacaacaaattctgaagtagatttaaaagaagtcttgaatacgcagcgttttgattttgaaaaagcgagcgagtcagcaggatggatcaaagaacttgagtctggtgggcatgcatcgcatacacctgaaacagaagaatatggtatatcatcgtttgtatataaacgtcgtctacctttccatgctaaaaggttcaatgattggttagaaagcatgccaaataatgtcgttcgatcaaaaggtatcgtatggctagcacaatacaatcacgtagcatgtttattatctcaagcagggtcatcttgcaatattcatccagttacatattgggtggctagtatgtctgaagcgcaacaaacacaaatattagcagaacgtcaagatgtcgcagctgaatgggatccagaatatggcgatcgtcatacacaatttgtcattattggtacagaattagatgaagaaaaattaacaaaagaactcgacgcatgcttagtcaatgcgcaagaaattgatgcagattggcaacaatttgaagatccatatcaatggcaaattagaccagcacgataagttgaatgaagtataatcatttttgaattgtggcttaattgtttgcaatttatgacaattaataaaaagttaaggtgttcttaggatctttttgttttcaatctatctaaagtgtgatagttttgataaagcagaaatttgcattttatccatagggctaggacatgtatgtgtcttagtcctttttatatttacgttgatgaaaaatggcaaaaccatcgtaccaactgttaattgaaggtacaatcattgtttaacagtcataaaaatgagtgaagtaaatgcagctatcaatgtactattaacacttacggtcacacgagtgtttcagtctaaacgtgcaacgcaattccgcacgtggccaatatatcttgcgctagatcatgaaaatcattaagatttcgcatgccaaatcatgaatgtctcagaactcgagtatcaaacataaaacacgccacaaaaatataacgcgtcagactacaaagatcacgaatattccgtatgtcccactaagaacgtcctatacaaaaaacaccaagaccatttatttgcaacaaactaacaagactcacctcacatcaataaatcaacacaaagcaaagccaccatccctattggtatagtggcctgagaattttaagtattcaattcgcttaaattattttgcgaaaatgtcgataattgctttgatgattttaatgatagtacctacaatagccatcgttttgtcctcctgtatgttgatttaacatagtgatgagttgttgatcgttaatgtttgagattagttgttacctaaaaatttaccaagtaaatctttaaagaatttgaataattttgctacgaattccatgtgaatggcccccttcaaataagatgttcatatctatgagatttttataacttacttaccagtgaatttctcaattaatcctttaatgaatttaatgattcctgcaatgatacccatgtgaaagacctcctttgtttgttatgaaatcttatttaccagtgaattgttcgattaagcttttgataactttaatgatgccagcgatgatacccattaagattacctcctttgcttatgagttaacttcattgtacatagttatcttgtgcgtaattgatttttttcctaacttgaattgttatgatcataactgcgaattttttattttaaaaggacgggaaatactgcctaactgtacaggtgcatttacaaaatctttacaatcattggtttaatagaggttaagctcatgaatttgacatgaagcagaaatttaattatattttatgttataagtttaaaacgaataacacgttaggtctcgtctaggcaaagcatatttatgaagatgaattgaacagacagaagtaacattttatatacatatgtgcatgggagcacgcttaaagagaacactgcaacaaggtatatcaacgtaccgtgatgcagtgtctagttaaactgaaacctgcaatagtaaattttctgccattatgtacagaatctactattgtaggtttttatttttatacataagcaattatgcgagagattagaaataaggaggttatgcagtgttaagttttcaattgctattttcactgtttgttattgcgcttatcattgcattgataagtggcttgttgtttttagcaccagttatgccaatgagatatattaaattacatttatacatactagtcatgccagtattatttgcagtcattggctttttcggtattcatggtcaacatgtcttaggtccatttaaaatagatcgtttatcttggttattagctggctttgtaatggcgcttggctttattattcaaaagttttcaatgcgatatttactaggtgatcatcattatagacattactttccattgttcactgcgattacgtcgtttgcatctttagcatggatgtctgaagacttaagactgatggcactctgctggggtattacattattatgtttaacattgctgatgaacgttaatcgtttttggaaagtgccacgtgagtctgcgaaattatcaagcatgacatttttatgtggttggcttgcattcgttggagcaattgtaactatttatattgcgactggcgagtggcgggtaccacaacatatagttcatccgacatggtcattgttgacgaatgtactacttgtattagctgtcatgataccggcagcacaatttccttttcatcgatggttgattgaatctgtaacggcaccaacgccagtatcggcaattatgcatgcaggaattgtgaatgcaggtggtgttattctaactcgttttgcgccgatatttgataatggatttgcgttatcattattacttatcctttctagtatttctgtattgttaggatcgggtattagcttagttcaagttgactataaacgccaattagtgggctctacgatgagtcaaatgggctttatgttagttcaatgtgcattgggtgtatattcagcagcgattattcatttaatattgcacggtatttttaaagcaacattatttttacaatcaggttctatcgtgaagcgattcaatattccaaaacaagcatctgctaaagacgcttatggctggattgtcatgggacgtgtattagctattatcgtggcatttctattttggatgagtagtgacagaagtgcatatgaagtgttaagtgcactcattctaggatggtcattacttgtatcttggaatcaaatggtagcctttagtaaaggacgcatggcacgtcttgttggtatgattttgattgcaatcgtgacatttatctacgtcatcacacataattatttttacgctgtattacaaaatataacaacacatgcgacaacgccgcctacagtgagtgtcatcattagtgttgttattttaatctttggcagtttattaagtatttgggtggcgcggcatcgatactctaaggcttttgcggtattgtacgtgtggttagttaatctaggtgaagcacgctcgaaagcgatagaaagtcatccgaattatttgaagaagtatttataggaggtgaaaggtatgacaacacagttaaatatcaattcagtcattgaaaatgcgaaacgtgttattacaccattatcaccaatttcgatttttgcagcacgaaatccatgggaaggattagaagcggatacgtttgaagatgtcgcaaaatggttacgtgatgttcgagatgtggatattttcccaaataaagcattaatagaaagcgctgtggcacgtggtgaattagatgaaagtgtctttaatcaacttgttactgatatgttacttgaacatcactacaatatcccgcaacactacatcaatctttatattgataacattaaaacattaaaagacgtacctgcatcatatatgaatcattcaaatgttgatgttgttgctgatctactattagaaaaatcaaaacgtgatatggctgaatcatatcatcactatgatgtacgtccgatgagtgatgcaataatagatgaacaaggtgagccacttagcgaacaagtgaatcgtcaaatgattaaatggacgaaactttatatcgatcaatttctatcgagttggacaatgccgaagcgtgagcaaagtttttaccatgcatggttgcatttagcgcaacatgaccatagttttactaaagcacagcgccaagtgattaaaggcttacccaatgatcctgaaatgacgatagagtcagtattaactcatttttcaatagatcaggaagactaccaagcttatgttgaaggacatcttttggcgttaccgggttgggcaggtatgttgtattaccgttcacaacagcattactttgaacaacatttgttaacggattatttggcaattcggttagttgtcgaacaattgctagttggtgatgagtttaagtcagtcgctaaagattgtgaaagtagatcggaaaattggtttaagcaaactgttgcatcatggtgttactacagtgatatgcctagcgatgtattactacaacatgacgtcaatgaaattcaaacgtttattcattttgcagcaactatgaataaaaatgtatttaaaaatttatggctaattgcctgggaaatgacatacgaatctcagttaaaacaaaaaattaaagcaggtcatgaaagtgtggcgggcgcattagatgtaaaccaagtaaatgtctcagaaaatgataacgctaatcagccacattcagtattgttaaatgacacacaagcagttgatgaaaataatagcgagctaaatcagatgggcacatcaacgaaagcgcaaattgcattttgtatagatgttcgttcagaaccatttcgtagacatatcgaagcagcagggccctttgaaacgattggtattgcaggcttctttggattacctattcaaaaagatgccgtagacgaacaattcaaacatgattcattacctgtcatggtaccgccggcatatcgcattaaagaatttgcagaccgctacgatatgaatgtttatcgacaacagcaacagacaatgtcatcgatgttttacacatttaaattgatgaaaaataatgtcatgcctagtctgttattgcctgaattaagtgggccatttttaagcttaagtaccattgtcaattcgattatgcctagaaaaagtcgcgcgtctttacaaaaaataaaacaaaagtggttgaaaaagcctgaaacaaagttgacgattgatcgtgagtttgaccgaacatcagacttacctgttggatttactgagcaagagcaaattgatttcgcgttacaagcgttgaaattgatggatttaaccgaagcatttgcgccgttcgttgtgttagcaggtcatgctagtcattctcacaataatccacatcatgcatcacttgaatgtggggcttgtggtggcgcatcaagcggttttaatgctaagttattagcgatgatatgtaatcgtccaaatgtcagacaaggattaaaacaatcaggtgtgtatattccagagacaactgtttttgcggtagcagaacatcatacgtctactgatacgttggcatgggtatatgtgccagacacattatcttctattgctttagatgcatatgaatcattgaatgacgcgatgccgatgatttctgaacacgcgaatcgcgaacgtttggacaaactgccaacgattggtcgtgtgaatcatccagtggaagaagcgcagcggtttgcgagtgattggagtgaggtacgtccagaatggggattggctaaaaatgcatcatttataattggacgacgccaattaacaaaaggcattgatttagaagggcggacatttttacacaattatgattggcgtaaagataaagatggcacattattaaataccatcatttctggtccggcacttgtggcacaatggattaatttacaatattatgcgtcgacagttgcgccgcatttttacggaagtgggaataaagcgacacaaaccgtcacgtcaggtgttggtgtcatgcaaggtaatgcgagtgatctgatgtatggcttatcatggcaatctgttatggctgctgatcggacgatgtatcattcgccaattcgtttacttgtcgttattcaggcacccgactatgttgtagcaagactactcgcgaataatgagcatttcgctaggaaggtgtctaatcattggctgcgtttaatgagcgttaatgaggaagggcgttttaaaagttggatttaacgatgatatgttgcgatgctaagtaactaatatatcatcatatctacaatgttctagcttcttaaaatatactaaaaatgataaacttaatgtaatagttgatgtcgtgataacgatacaaagatgaagtaatcaattttaatattattggagttagtgatatgaaaagaacgaaaggtgaaatcgaagctgaaatcagtaaagccattacgcaatgggaaaaagatttccttggcagaggttccttgtcagttaaatcagacattttaagagatatggtgattattagtttacaaggtatcttaacgccagctgaatatcgtgtatgtagtacgaatgaaggattattaaatattaaacgaacacgttctgaattagttgaatccggtgagcaagatttgaatgatatcatttttaaaattacaggtatcaaagtgatgagcttccatagtgatttaagtacagttacaggtgaacgtattatcgtattcaaacttgaggataatttggaaaagcatatttaagaaggttaggtatgcttctgctggcttattaaagctatagaagtatgcttggttaaacagcgcaacgccatatatttgggtgtgctgtttttctattacatgatgtgtttattacgtggatgaatgcgtgggtctgaatatagcccgtgaaaggcgtatgtcataaaatttgcgaatggtgacaagtcgacgcaagcatatttgttgcgagacatgcccactatccttttacataaagagtatatgtgtgacgtaggcatataatcgataaagtattcctaaaaaattaggtataatgaccattgttgcaataagtttttcggccttgaaaccgataacgcatagtataataggaataaaatataatacaaatatccagtaaatcaaatttgaaaatgatggatgaataggggtaaagaatctaactaatgtaatgattaacgctatatagacaaaaataactctattgatacgccttaccccctctgtataataaatataaatcgtactaaattgaaaatagcaaaatattgttatttcaattatacaatgttttatttgcaatatacataacaatatgaactttataattttgatattgtcggtaaagtgaaatttgtggcacattgatattatggataacatttgtaaaatgaaaatgatgatacgaggagattgtaagatgatagataaaaaattaacatcaccgaaaatgacagtgcctttatttttaatcgcgctgattgtatttataggtatgttttacagtgtagtgacaaatcaagaatggcttaaaaatatagatatgggatcattaacatggtttacagattatttcggtgagccacaacgtcagtatgttaacaatttgtttaattactatatgacgtttagtgcggaaattggagatgtcaaaggtgtcgtgttgatttccattatcgtcacaatcatactgtttattaaacagaggcatttagcggtttggtttgtgacatatttggtttcaggtgtcatcatgaacaaattaattaaagatactgtattacgtccaagaccatataatcatttagccgttgatacaggcttttcatttccgagtggacattccaacgccagcacattattatatttcgccttaatgatcattattatttcacttgctgctaagacaataacaaaagtgttgagtgcgttggttatgggaatattatggcttagcatattattttgtcgcctttattttcatgcacattacttttcagatgtcattggcggcacgtcactagcaatcatttgggtagcgttattcttaatggtatacccatactttattaatcatcgacgacaacgcgtttagcaaacatctttagacatagtggaggtatatagaaaaatgagaattaaaacaccgagtccatcgtatttaaaaggcacaaatggacatgcgatattattattacattcatttacaggtacaaatcgggatgtgaagcatcttgcagctgagttaaatgaccaaggatttagttgttatgcaccgaattatccaggtcatggtttattgttgaaagatttcatgacatataatgtagatgattggtgggaagaagttgagaaagcttaccaatttttagtcaatgaaggttatgaatctatcagtgcaacgggtgtgtctttaggtggattaatgacattaaaattggcgcaacactatcctttgaaacgtatcgctgtcatgtcagcaccaaaggaaaagagtgacgatggcttaatagaacatttagtttattatagtcaacgcatgtcgaatattttaaatttagatcagcaagcatcgagtgcgcaattagcagcaattgatgattatgaaggtgaaattacgaagtttcaacattttattgatgatatcatgacaaatttaaatgttattaaaatgccagctaatatattatttggtggtaaagatgcgccatcctatgaaacaagtgcacattttatttatgaacatttaggatcagtagacaaagaattaaatggtctgaaggattcgcatcatttaatgacgcatggagaaggcagagatattttagaagaaaatgttattcgctttttcaatgctttaacataattgaagattttaaaaattaacacttgagtgacgatgttattatatttgtcatttgagtgttttttgtggcgtgatagtatagggaacttagctaaagttaatttgtagtgtgatgtcgtggaaatattatggagttataccagaagttgatttgtattgtaatgtcgtggaaattttatgggcattgcacctgaagttgttatgtggcgagatgttggggatatagatggtgttgtatgtggcgagatattggcgcacgtatacagcgttgaaccagaaaatttaatgtagcgtaatgacaacacattacaagagttgattatattatgataaatccaggtgctaccgtattaatgaaacaattttgatgcaggtgtattgcatgttatttacatacatgttagagtgttacttaaacacgtagacgctttaacgctttaaaggagatgtgaatgatgaaaagacaacaatcacaatggaagtcatcaactggatttattttagctagtgcgggttctgcaatcggtcttggtgccatgtggaaattcccatatatggcagggatttatggcggcggtgcctttctagctatgttcttaatattcaccatttttgttgggttgccattactcattatggaattcactgttgggaaaatgggacggacatatacaacacaaatatatagtaaattaactggtaaaaaatggctcaatatcattggctggaacggtaatttggcagtgtttattttatttggcttctatagtgttatcggtggttggattgtcatttacatcggacaagtattatggcaattagttatatttcaacgcatcaatcatctccaagaaatgaattttgaagcggtaatatcaaatccttggttaaccgttctagggcaaggtatattcatattcgctacgatgattattgtcatgttaggtgttgaaaaaggattagaaaaggcatcgaaagttatgatgccattgctgtttgtctttttaatcgtcattgtgattaagtctttaacattagatggcgccttagaaggtgtgaaatttattttacaaccaagagtatcagagattactgctgatggcatcttgtttgcgctaggtcaatcattctttacgttatcattaggaactacaggtatgattacttatgcgagttatgcctctaaagacatgacgattaagtcatcagctatttctatcgttgttatgaatatctttgtatctgtattggcaggtctagctatatttccggctttacatagttttggctatgaaccacaagaagggcctggattattatttaaagtactgccaatggtctttagtcaaatgcatctaggcacattattctatttgggattcttagtgctgttcttatttgcggctttaacgtcatctatttctttattagaattaaatgtttctaacttcacgaagaatgacaatacaaaacgtaaaaaagtcgcagtgatcggtagtattttagtatttatcattagtattccagcaaccttatcttttggtatcttaaaagatgtaagattcggtgcgggaacgatttttgataatatggatttcatcgtttcgaatgtattgatgccattaggcgcattaggtactacgcttgtcgtaggacaattattagataaaaaattattacaacaatattttggtaaagatcgatttagattattcagtggttggtattacttaattaagtatgcgatgcctgtcgttattattttagtctttatcgtgcaattatttagttaatatatagaagcatctgacacacaagtatttgtgttgctcaggtgtttttttgtttggaattgaaaatttagtactggttctgaattaatcgaaacttagataattgcaaaataacaaaatgtcgtttataattcttatctgaaaagtaagaattaaaattgagacatgaagaaaggtttcattcatttgatcggcatgtcagatgagggtgcatctatgattacttatgatttaattggcaatacaccattagtactgttagaacattatagtgatgataaagttaaaatttatgccaagcttgaacaatggaatcctggaggcagtgttaaagacagactcgggaaatatttagtagagaaggcaattcaagaagggcgtgtgcgtgcaggtcaaactattgttgaagcgactgctggtaatacaggcatagggttagctattgcagcgaatagacatcatttgaaatgtaagatctttgcgccgtatggtttttcagaagaaaagattaatattatgatagcgcttggtgcagaagtttcaaggacgagtcagtctgaaggtatgcatggggcacaattagctgcacgttcctatgctgaaaaatatggtgccgtttatatgaatcaatttgaatccgaacataatccggatacatattttcatacattgggacccgaattgacttcagcattacagcaaattgattattttgtggctggtattggctctggcggtacatttacaggtaccgcacgttatttaaagcaacatcacgtgcaatgttatgccgttgagccagaagggtccgtgttaaatggagggccagctcatgcacatgacactgaaggtatcggttctgagaaatggccgatatttttagagagacgtcttgtagatgggatatttacgattaaagatcaagatgcctttcgaaatgtcaaaagtttggctataaatgaagggttgttagtaggcagttcttcaggtgcagcattacaaggtgcattgaatttaaaagcgcaattatctgaaggtacgattgttgtcgtatttccagatggtagtgatcgatatatgtctaagcaaatatttaattatgaggagaataataatgaacaagaaaactaaattaattcatggtgggcacacaacagacgattatacaggtgccgttacaacaccaatttatcaaacaagtacatatttacaagatgatattggtgatttacgtcaaggatatgaatattctcgtactgcgaatccaacaagaagttctgtagaaagcgttattgcgacattagaaaatggcaaacatggctttgcatttagttcaggtgttgcagcaatcagtgcagttgttatgctgttggacaaaggagatcatattattttaaattcagatgtatacggcggtacttatcgcgcattgacaaaagtatttacacgatttggcattgaagtggattttgtagatacaacgcatacagattcaattgtacaagcgatacgcccaacaacaaagatgttgtttattgaaacaccttctaatccattattacgtgttactgacattaaaaagtctgctgaaattgcgaaagaacacggtttgatttcagttgttgataacacatttatgacaccttattatcagaatccattagatttaggtatcgatattgtcttacattctgcaacgaaatatttaggtggacatagtgatgtcgttgctggtttagttgcaacatcggatgacaagcttgcagaacgtttagcatttatttcaaattcaacaggtggcattttaggacctcaagatagctatttacttgtgaggggtattaaaacattaggtttacgtatggaacaaattaatcgcagcgttattgaaattattaaaatgttacaagcacatccagctgtgcaacaagtgttccatccaagtattgaaagtcatttaaatcatgatgtccatatggctcaagcggatggccatacaggtgtgattgcatttgaagtgaaaaatacagaaagtgccaaacaattgattaaagcaacatcgtattacacattagctgaaagtttaggtgcagtggaaagtttaatttcagtacctgcattgatgacacatgcatccattccagcagatattcgagctaaagaaggtattacagacggacttgtaagaatttctgtaggtattgaagatactgaagatttagtcgatgatttaaaacaagcactagatactttataaataatagcagcactggcatatattttgagttcaacgtttgttgttcttgaatatgctagtgcttttttgtgcgatgttaatatttagtaattgcgttgtggaggattggtggacatttttatggatttaatttgataaatgtcatagtagtctcacaattcgtcattgtcacatgaattacttattttttaattttttagaaaattcggcaaattgtattgacgatatatgcaattttacatataatgctcttattcctagtggattaataagaatttgtaggaggggcgatgatgattgagtttcgacaggtaagtaagacctttaataaaaagaagcaaaaaatagatgctttgaaggacgtatcatttacggtcaatcgcaatgatatttttggtgtgattggatatagtggtgcaggaaaaagtacgttggtaagactcgtgaatcatcttgaagctgcctcgaatggacaagtgattgtagatggacatgatattacgaattatagcgataaaatgatgagggatattaagaaagatatcggtatgatatttcagcatttcaatttattaaattcagctaccgtatttaaaaatgtagcaatgccactcattttaagtaagaaaagcaaaacagaaattaagcaacgagtaacggaaatgcttgaatttgtaggattgagtgataaaaaagaccaatttcctgatgaattatctggtgggcagaagcaaagggtggctattgcaagagcgcttgttactaatccgaaaatactcctatgcgatgaagcaacaagcgcattggatccagcaacgactgcttcgatattgacgttattaaagaatgtcaatcaaacctttggcattacaattatgatgattacacatgaaatgcgcgttattaaagacatttgtaatcgtgttgctgtaatggaaaaggggaaagtggttgaaacaggaactgttaaagaggtgtttagtcatcctaaaacgacgattgctcaaaattttgtgtctacagttatacagactgagccaagtacatcattgattcgtcgattgaatgacgaacaagttggcgattttaaagattataaaatcttcgtcgaggaaactcaggtgacacaaccgattataaatgacttgattcaaatttgtggcagagaggttaaaattttattttcatctatgtcagaaatacaaggtaacaccgtatgttatatgtggcttcgatttaatatggatcaacaatttgaagacacggcaataaatcaatatttcaaagagaaaaatattcaatttgaggaggtgcattaacatatgtttggttctgatttagacagtgcacagttattacaagcattgtacgaaacgctatatatggtatctattgctttatttttaggagcagtgattggtattccattaggtgtcttattggtaattactcgaaaacaaggcatatggcccaatatagtgatacatcaagttttaaatcctttaatcaatattttaaggtcactaccatttattattttgttaattgcgattgtgccattcacaaaattagtagtaggtacttcaattggtacgactgctgccatcgtgcctttaacagtatatgtggcaccttacattgcaagacttgttgaaaactcattattggaagtagacgaggggattattgaagcggcgaaagcgatgggcgcttcaccactacaaatcattagatattttttaattcctgaagctttaggttcgttagtattagcaattaccactgcgattattggacttattggaagtacggcgatggcaggagctgttggcggtggtggtataggagacttagctttagtgtatggttatcaaagatttgatacgacggtcattattattaccgttattgtattagtcattattgtccaagtgattcaaacgctagggaatgttctagctagattcatacgtagacattaatgatatatagtgaagattttgaaaggaattgatagaatgaaaagattgattgggttagttatcgtagcacttgtattattagcagcgtgtggtggtaacaatgataaaaaagtaacaattggtgtcgcatcaaatgacactaaggcttgggagaaggttaaagaattagctaaaaaagatgatattgatgtggagattaagcacttctcagattacaatttaccgaataaagcattaaatgatggtgatattgatatgaatgcattccaacattttgcatttttagatcaatataaaaaggcgcataaaggaacaaagatttcagcattaagtacaacagttttagcaccgttgggcatttactcagataaaattaaagatgtcaaaaaggttaaagatggtgctaaagttgtcattccaaatgatgtgtcaaaccaagcacgtgcacttaaactattagaagcagctggtttaataaaactgaaaaaagatttcggattagcaggcacggtgaaagatataacgtcaaatccaaaacatttaaaaattactgcagtagatgcacaacaaactgcacgtgctttatctgatgtcgatattgcagttattaataacggtgtagcaactaaagcgggtaaagatcctaaaaatgatccgatatttttagaaaaatcaaattcagatgcagtaaagccatatattaatattgttgcagttaatgacaaagacttggataacaaaacatatgctaaaatcgtagaattgtatcattcaaaagaagctcaaaaagcgttgcaggaagatgtcaaagatggagagaaacctgttaatttatctaaagatgagattaaggcaatagaaacgtcattagcaaaataaattatattgcgtcctacaagcaaagttcatgcttatgtttgtagggcgttattgttggagaataaaattatttccaatagagaaagggattgtaatcattttatagtgaaatattatgaaattgtaataatttagatattgtaaaatctaataagttgtaataattttaaggggtaattataaaatttgatgatacagtatatgatttttttgtaatcataatgtcatcaaacatcaacctattatacataataaaatcgtataatgatgtagtattcataaattcggataaaagaatgttaggaaagttaagcaagaggaggattttaaagtgcaaaaaaaagtaattgcagctattattgggacaagcgcgattagcgctgttgcggcaactcaagcaaatgcggctacaactcacacagtaaaaccgggtgaatcagtgtgggcaatttcaaataagtatgggatttcgattgctaaattaaagtcattaaacaatttaacatctaatctaattttcccaaaccaagtactaaaagtatctggctcaagtaattctacgagtaatagtagccgtccatcaacgaactcaggtggcggatcatactacacagtacaagcaggcgactcattatcattaatcgcatcaaaatatggtacaacttaccaaaacattatgcgacttaatggtttaaataatttctttatttatccaggtcaaaaattaaaagtatcaggtactgctagctcaagtaacgctgcgagcaatagtagccgtccatcaacgaactcaggtggcggatcatactatacagtacaagcaggtgactcattgtcattaattgcatcaaaatatggtacaacttatcaaaaaattatgagcttaaatggcttaaataatttctttatatatccgggtcaaaaattgaaagtaactggtaatgcatctacgaactcaggatctgcaacaacgacaaatagaggttacaatacaccagtattcagtcaccaaaacttatatacatggggtcaatgtacatatcatgtatttaatcgtcgtgctgaaattggtaaaggtattagtacttattggtggaatgctaataactgggataacgcagcggcagcagatggttacactatcgacaatagacctactgtaggttctatcgctcaaacagatgtaggttactatggtcatgttatgtttgtagaacgtgtaaataacgatggtagtattttagtttcagaaatgaactattcagctgcaccaggtattttaacttacagaacggtaccagcttaccaagtaaataattatagatatattcactaaagtcttacgtatataaatatataatgaattcctattacatttcacaagctgaaaagttggattgaatcctaaattttatggcggggctatcaaagtcgtgattgttgtaataggaatttttgtatatgaaaaaggattggtcgaatgaacttcatgttctatgttcgaccaatccttttctgaattagtattcatgttttactttgcgaatgcttgtaaataatctagcaccgtttgttattaaagtaacaactgccactgcttttttgaacttacgtggtgacttaattgaaatgtaaaagtctaacacggttcctacagtgcttaaacctaatgaaagatatactaattttttatttttagcatgatatttatagccattgtagccgtcgactatgaaacctgcgacatttagtaaacttgataaacgttgtgatttggaacgttttgccataataataattccccctagtatcttctgtttatatgaaaagttgggtgcgctgaattgctaacgttttgcgctataactactcatatatgataacataattgtacagtataatttgaaaaattgatttcacaaagttggggtgtcaaagatgattaaatgtgtctgtttagttgaagaaacagctgataaaatattgcttgttcaagtaaggaatcgcgaaaagtattatttcccgggtggtaaaatagaagaaggggaatcacaagtacacgcgctgttaagagaagtaaaagaagaattaaatttaacattaacaatggatgaaattgaatatgtcgggacaattgtaggtcctgcatatccacaacaggatatgttaactgagttaaatggatttcgcgcattaaccaaaatcgattgggaaaacgtaactatcaataatgaaattacggatatacgctggattgataaagataatgatgcgttgattgcgcctgctgtcaaagtttggattgaaacttatggtggtaaacatgacaaataatgacaccatcatgttacgacattatgtcccacaagattattcgatgttagaagcttttcaattaagtgaaagtgatttgaagtttgttaaaacgccagaggaaaatattacagctgcaatgtctgataatgaaaggtatcccatcgttgtaatggatggcaggcaatgtgtggccttttttacattacatcgtggaaaaggggtcgcaccatttagcgataaccaagatgcagtatttttcaggtcatttagtgttgatcaacgttatcgtaatagaggaataggtaaagtggtaatggaaaaattggcgtcatttatcacttcaacatttcaggatattaatgagattgtgttaacggttaatactgacaatccacatgccatggcactttatcgccaacaaggatatcaatatatgggagatagtatgttcgtcggaagacctgttcatattatggcgttaactataaaataaattaaatttaaaagcatctttactcatcgtcgaccacaacaattaatgatgaataaaggtgctttttgttatagatcatcggacaatttactatagtaaaaagcgacctagtgaacaattgacatatatccacaggtcgcttaacttaagttatattgctagttgcgattaattgatagactcatcatttttgcgctgtcgagatggtctttttattaaaaatgccgtaatccaagccgtaatcggaatactgattgcaacggcaataccgcctaaaataatagaaataaattcttgggcaaatattttcgagtttataatatgaccaaatgaatatttaagtttgaaaaaccaaataaataaagcaagttggccaccaaaaaaggcaaggtaaatcgtgttcgcagatgtcgctaaaatttctctaccaacacgcatgccagattggaataattcgtattgcgtaagcgttggattcacttgatgcaattcataaatgggtgaactaatggtaattgttaaatctatcacagctgcaataacagcaagaataatagtgaacaccataaattgaaccatatcaatgccaatattcattgaatacacatatgtttcatcttgttgttcggttgaaaagccttgtagatgaccgaagtagaccgataaataaatgagtgtaatcaacaatattgttgtaacgatagtgctgataaatgcagcttgtgttttaacattgtaactattgagtacgaataaattacaagcgccaataataatgcagaaaaagaatgtgacgacataaatcggtacgccaaaaataatcaatacaatactaataattaaaatagcgaaatttaaaaatagggttaaataagagatgaatccctttttacctccgaaaattatcatcagaaagaggagcaataacgccaatataaatacagcattcattgtttcgccctccttaatgtttcaaatatttccataaacaatattgtgataggaattgtaagtacgatacctataccacctgttagtgcgcgcgcaatttctaacgaccaattcatcgaaatagtataagtcactgtattggcattttttaaaaagattaaaaacataggtagtgcaccggataaatatgagaataataagatgttagtcattgttcccataatatcttggccgatgtttcgcccagcaagcgcccatctcctcattgaaatgtgtggcgtacgctgtaaaatttcatgcataccactagcaattgtaattgcaacatccataatagcgccaagtgaacctattaacactgaggctaggaagatatctttcggtggtaatgataaaaagttcatcgtttcatatttaatgcctttaccatctgccatatatatgattaattctgttaaacctatactcaaaaaagttccgataattgtactggctatggtaatgagtgtacgcatatgccagcctgtaacgagcaataaagtgagtattgttgaacagatcatggcaatggtcatgagtaagaataaattaatattgctatgttgaatatgaatgtaaattgcgattaatatggcaatagaattcaagattaacgataaaatcgattgcagtccgactttgcgaccaaccaataatacagttaataagaacaaaccagtgatgataaccgttaaggtatcacgcttcttttctataatataagcatcactcggcttgttagaaatatgtaataatactttttcgtgtgtgcgaaatgcctcagaatctgcttgcgatttgacgtactgatgattaatcgtcgtcgtttctccagcaaattgaccatttaatattttgacttttaattgatttttatatttaatatcacgattattttgtgcatcttttgtaggtgtcgaagaaacatgtttgacatctataatttgaccaattggtttgttgtaaaagttctcattattgaatgtaaataaaatagcaccaatgaatgcgatgcagaacaaacctaaaattatattaaatggctttgtaaataaatttctatatttcaaaaacaaaaccccaattctatgaatgaattaatatggtgattatacgcccttaattttttattttcaaagatattactgctaagtgtaaaacgaaaatcatcattgatagcatcgaattacttaatggaatgtagacgttttagtcattaattgctgaataagtgttaataatatgccaatatcactctttgtataaggctcctttgtaatagcacatatcgttctttttaattcagtatgatctaattttatatctatccatgatttagattctggtaaatgtatattttgtgatgaaatgatgtaaccttctttttgacgaaggagatactgcgcaagtggttggctactgattgtgtatacatctgatttagtaatcttgcgcaattgtttttttacagtttcggcaaatggtgccaagcaataaatatgactatgctcaaactgaattaatggtgggtgtgtcgccatcgtaattggatcgtctgaaggcgcatataaatgatagtgctcttcgaataaaggtagcatatgtaattgtttgtgtttacgtatttctggtgtaagttccgtgaaaccaatgtctatattcccatttaatacgctatttataattgtgtcatgttctaataagctcggtatgacatgtgtatcattttgtaaatgaaacgtttggataagtggtagtaacatgtgggatacgtcactctcatcatagccaatgtagatacttttatttttagttaatccatggctttgaaattgttcaatcgtgctatctaaatgttcaataatacgcagagcttcattaaataataatttcccttcagatgtgagcgtaatattgcgtccttgctttttaaataaagacacattaagttcttgttctaataatgtaatttgacggcttatcgctgattgagcaatgtttagttcaagtgctgtttcggagatatgttctcttttagcgacctcgataaaatatcttaattgtttaatttccatagcgatataggcacctccaaaaatgagtgttttgtaactattatagcaatattattgataaatgttctattttttagatgaatatcttctattttatatattgaaaagataaattttttagattatagtaattatcattaataactaatatcagaatattctaaaaaaggggtgtgcatcatgcacaatgagaaattaattaaaggcttatatgactatcgtgaggaacatgatgcgtgtggtattggtttttatgcgaatatggataataaaaggtctcacgacatcattgataaatcgcttgaaatgttgcgacgcttagatcacaggggcggggtcggcgcagatggcatcactggtgatggcgcaggtattatgactgaaataccttttgcatttttcaaacaacatgtaacggactttgatatcccaggtgaaggtgaatatgccgtggggttatttttttccaaagaacgcattttaggttctgaacatgaagtagtttttaaaaaatattttgaaggcgaagggttatcaattcttggttatcgtaatgtaccagttaataaagatgccattgctaaacatgtagcagatacgatgccagtcattcaacaagtgtttattgatattagggacattgaagatgttgaaaagcgtttgtttttagcgagaaaacaattagagttctattcgactcagtgcgatttagaattgtattttacgagcttatcacgcaaaacaattgtatataaaggttggttacgatcagaccaaattaaaaaactatatacagatttatcggatgatttatatcaatcaaagctagggttagtgcattcgagatttagtacgaatacattcccgagttggaaaagggcacatcctaaccgtatgttaatgcataatggtgagattaacacgattaaaggtaatgtaaactggatgcgagcacgccaacataaattaatcgaaacattatttggcgaggatcaacataaagtgtttcaaattgtcgatgaggatggtagtgactctgccattgtagataatgcgctagagttcttatcgttagccatggagccagaaaaggcagcgatgttactcatacctgaaccttggttatataatgaagcgaatgatgcaaatgtacgtgcgttttatgaattttatagttatttaatggaaccgtgggatggtcctacaatgatttcgttctgtaacggtgacaaacttggcgcgcttacagatagaaatggattacgtccaggtcgttatacgattactaaagataactttattgtcttttcatctgaagtgggtgttgtggacgtacctgaaagtaatgttgcttttaaaggtcaattgaatcctggaaagttattgcttgttgattttaaacagaataaagtcattgaaaataatgatttaaaaggtgcgattgctggagaattaccatataaagcgtggattgataaccataaagttgactttgattttgaaaatatacaatatcaagattcgcaatggaaagatgagacgttatttaaattacaacgtcagtttgcatacacgaaagaagagattcataagtatattcaggaacttgtagaaggtaagaaggatcctatcggtgcaatgggatatgatgcgccaattgcagtgttgaacgagcgaccagaatcactatttaattactttaaacagctgtttgcacaagttacgaatccaccaattgatgcgtatcgtgaaaaaatcgtaacgagtgaactttcttatttaggtggcgaaggtaacttactagcacctgacgaaacggttttagatcgtattcaattgaaaaggccggtattgaatgaatcacacttagcagcgattgatcaggaacattttaaattaacttatttatcaacggtatatgaaggggatttggaagatgcgttagaagcattaggccgagaagcagtgaatgctgtaaagcaaggcgctcaaattctagtgttagatgatagtggattagttgatagcaatggctttgcaatgccgatgttactcgcaataagtcatgtgcatcaattacttattaaagcagatttacgtatgtctacaagtttagtcgctaaatctggtgagacacgagaagtgcatcatgttgcttgtttactcgcatatggcgcgaatgcaattgtgccatacctagcgcaacgtacagttgaacaactgacattgacagaagggttacaaggcaccgttgtcgataatgttaagacatatacggatgtattgtcagaaggtgtcattaaagtaatggctaagatgggaatttcgacagtgcaaagttatcaaggggcacaaatatttgaagcgattggcttgtctcatgatgtgattgatcgttattttactgggacacagtctaagttatctggtatttcgattgatcaaattgatgctgaaaataaagcacgtcaacaaagtgatgataattatcttgcatcaggtagtacattccaatggagacaacaaggtcaacatcatgcttttaatccggaatctattttcttattgcagcacgcatgtaaagaaaatgactatgcgcaatttaaagcatactctgaagcggtgaacaaaaatagaacagatcacattagacatttacttgaatttaaagcatgtacaccgattgacatcgaccaagttgaaccggtaagtgacattgtcaaacgctttaatacaggggcgatgagttatggatcgatttcagcggaagcacatgaaacgttagcacaagccatgaaccaattaggtggaaagagtaatagtggtgaaggtggcgaagatgcaaaacgttatgaagtacaagttgatggaagcaacaaagtaagtgcgattaaacaagttgcttctgggcgttttggtgtaactagtgattatttacaacatgccaaagaaattcaaattaaagttgcgcaaggtgcaaagcctggtgaaggtggtcaattacctggtactaaggtatatccgtggattgcgaagacaagagggtcaacgccaggtatcggtctgatttcaccaccgccacatcatgatatttattcaatagaagatttagcgcaactgatacatgatttgaaaaatgcgaataaagatgcagatatcgcggtaaaattagtttcgaaaacaggtgttggtaccattgcatctggggtggcaaaagcatttgcagataaaattgtcatcagtggttacgatggtggtacaggggcttcacccaaaacgagtattcagcatgccggtgttccttgggagattggtttagcagaaacacatcaaacattaaaactaaatgacttaagaagtcgtgttaagttagaaacagacggtaagttattaactggtaaagatgtagcgtacgcatgtgcgcttggagcggaagaatttggatttgcaactgcaccattagtggtgttgggctgtattatgatgcgtgtatgccataaagatacatgtccagtaggagttgcaactcaaaacaaagatttacgtgctttatatagaggtaaagcacatcatgttgttaattttatgcattttattgcacaagaattaagagaaattttagcatctttaggtttgaaacgtgtagaagacttagttggaagaactgatttattacaacgatcatcaacattaaaagcgaatagcaaagcggctagtattgatgttgaaaaactgttatgtcctttcgatgggccaaacacaaaagaaattcaacaaaatcataatcttgagcatggatttgatttaacaaatttatatgaagtaacgaagccatatattgctgaagggcgtcgctatacaggtagctttacagtaaataatgaacaacgtgatgtaggggttattacaggtagtgagatttcgaaacaatatggagaagcaggacttcctgaaaatacaattaatgtttatacgaatggtcatgctggtcaaagtcttgcagcatatgcaccgaaaggcttaatgattcatcatactggagatgcgaatgactatgttggtaaaggattatctggtggtacggtcattgtcaaagcaccttttgaagaacgacaaaatgaaattattgctggtaacgtctcattctatggtgcgacaagtggtaaggcatttattaacggtagtgcaggagaaagattctgtattagaaatagtggtgtagatgttgtcgttgaaggtatcggcgaccatggattagagtatatgactggtggacatgtcattaatttaggtgatgtaggtaagaacttcggtcaaggtatgagtggtggtattgcttacgttatcccgtctgatgtagaagcttttgttgaaaataatcaactagatacgctttcgtttacaaagattaaacaccaagaagaaaaagcattcattaagcaaatgctggaagaacatgtgtcacacacgaatagtacgagagcgattcatgtgttaaaacattttgatcgcattgaagatgtcgtcgttaaagttattcctaaagattatcaattaatgatgcaaaaaattcatttgcacaaatcattacatgacaatgaagatgaagcgatgttagctgcattttacgatgacagtaaaacaatcgatgctaaacataaaccagccgttgtgtattaaggaaagggggagatacgatgggtgaatttaaaggatttatgaagtatgacaaacagtacttaggtgaattatcactggtagaccgtttgaagcatcataaagcatatcaacaacgatttactaaagaagatgcctctatccaaggtgcacgatgtatggattgtggaacgccgttttgtcaaaccggacaacagtatggtagggaaacaataggttgtccaattggaaactacattcctgaatggaacgacttagtgtatcatcaagattttaaaactgcttatgaacgcttaagcgaaacaaataactttcctgactttacagggcgtgtatgtcctgcaccatgcgaaagtgcttgtgtgatgaagattaatagagaatcgattgcgattaaaggtattgaacgcacaattattgatgaagcttttgaaaatggttgggtagcgccgaaagttccgagtcgccgtagagatgaaaaagtggcaatcgttggaagcggtccagcaggattagctgctgctgaagaacttaatctactaggatatcaagtaactatttatgaacgtgctagagaatcaggcggtttattaatgtgtggtattccgaatatgaaacttgataaagatgtggttcgacgtcgtattaagttaatggaagaagcgggcattactttcattaatggtgttgaagtcggcgttgatattgataaagcaacgttagaatctgagtatgatgccattatattatgtactggtgcacaaaaaggtagagatttacctttagaaggacgcatgggtgatggtatacatttcgctatggattatttaactgaacaaacgcagttgttaaatggagaaattgatgatataacaataactgcaaaagataagaatgtcattatcattggtgctggtgatacaggggcagactgtgtagcgacagcattaagagaaaattgtaaatcgattgttcaatttaataaatatacgaaattgccagaagcaattacatttacagaaaatgcatcatggcctttagcaatgccggtgtttaaaatggactatgcgcaccaagagtacgaagctaagtttggtaaggaaccacgtgcatatggtgttcaaacaatgcgttacgatgttgacgataaaggacacatacgtggtttgtatactcaaattttagagcaaggcgaaaatggtatggtcatgaaagaaggacctgaaagattttggcctgctgaccttgtattattatcaatcggcttcgaaggtacagaaccaacagtaccgaatgcttttaacattaaaacggatagaaatcgaatcgtggcggatgatacaaactatcaaactaataatgaaaaggtatttgctgctggagatgctagacgtggtcaaagtttagttgtatgggcaattaaagaaggtagaggcgtagcgaaagcagtagatcagtatttagctagtaaagtttgtgtataatctttgtatggaaatggtggttacgttgacgttgtgacatgctgaatcgagtttgaaaaaatctagtatctatcaacgtcacatgccatctttgtaacctaaaaacaaaggtttgtaagacaacaaatagattaattataagtagtgattttttacattcgtttataggtcaactgtagtggaagacaatgatttgtggtaatcatgtaatgcttaaaaacaatattgacttttacagaacgttcatatatgataaatattgtgtttaggaggaatacccaagtccggctgaagggatcggtcttgaaaaccgacaggggcttaacggctcgcgggggttcgaatccctcttcctccgccatcaatatttatattaaattctatatataatgaaggtaagtgctcaaattttgagtatttaccttttttatttgtctttgaatggctcgtaatttttgataatagaaatgataaggcattgagattggaagggcatttggcttgtgcaatatacatagctaaatgtcttttttgttttgtgaaatatgatggatggcttgtgtggacaagtttgctatttatagatatgcatttttcaatttaggagttggccatgcatctacactttataatggtgagagcgtggtgaggtattgttaataacgcaattgtagcgaggagttattgctacatatgtcgttatggctcattgattttctgaaatggctaccccagataattgtgacaaaataaaaatattttgttgaaagcctttacataacttgtctagacaagttatactcgttttaagacattaagggagtgaaatatatggctgtaaaaagagaagatgtaaaagccatcgtaaccgctattgggggaaaagaaaatcttgaagctgcaacgcattgtgtaacacgattacgtttagtgctgaaggatgaaagtaaagttgataaagacgcattaagtaataacgcgttggtcaaggggcagtttaaagcagaccatcaatatcaaattgtcattggtccaggaacagtcgatgaagtgtataagcagtttattgatgaaacaggtgctcaagaagcttcgaaagatgaagcgaaacaagcagctgcacaaaaagggaatccagtacaacgtttgatcaaattgttgggggatatttttataccaatattacctgcgattgtgacagctggtttgttaatgggaatcaataatttacttacaatgaaaggtttatttggtccaaaagcacttattgagatgtatccacaaattgctgatatttcaaacatcattaatgtgattgcgagtacggcatttattttcttaccagcattaattggttggagtagtatgcgtgtatttggtggtagtccgattctaggcatagtcttaggtttgattttaatgcatccgcaattagtatctcagtatgatttggcaaaagggaatattccgacgtggaacttatttggcttagagattaagcagttgaattaccaaggtcaagtgttgccagttttaattgcagcttacgttctagctaaaattgaaaaaggattaaataaagtcgttcacgattcgataaaaatgttggtcgttggacccgtagcgcttttagttactggatttttagcatttattatcattggaccagttgcgttattgattggtacaggtattacatctggtgttacatttatattccaacatgcaggatggcttggcggagcaatatatggattgttatatgcaccacttgtaattacaggactacaccatatgtttttagcagtagatttccaattgatgggtagcagcttaggcggtacgtatttatggccaattgttgcgatttccaatatttgtcagggctctgcagcatttggagcatggtttgtctataaacgtcgtaaaatggttaaagaagaaggcttggcattaacatcttgtatttctggtatgttaggtgttactgaaccagccatgttcggtgtgaacttacctctgaaatatccatttatcgctgcgatatcaacgtcttgtgtattgggggcaatcgttggtatgaataacgtacttggaaaagttggtgttggtggcgtgccagcattcatttcaattcaaaaagaattttggccagtatatcttattgtgacagctattgctattgttgtaccatgtatactaacaattgtgatgtctcattttagtaaacaaaaagcgaaagaaattgttgaagattaataaaataaaaaaggggcgttcgttatttggacgtcctttattacgttataaggtggtaattgtgtgtcgaaagaaatagattggagaaaatccgttgtatatcaaatttatcctaagtcgtttaatgatacgacggggaatggtataggagatatcaatggaattatagaaaaattggattatatcaagttattgggtgttgattatatttggttaacaccagtgtatgaatcaccgatgaatgataatggctatgatatcagcaattatttagaaatcaatgaagactttggaacgatggatgattttgaaaagttaatcaaagttgcgcatcaaaaagacttgaaagtgatgttagatattgtcattaatcatacgtcgacggagcatgaatggtttaaagaagcccgtaaatctaaagataacccttatagagattattactttttcagatcatctgaagacgggccgccaacaaattggtattctaaattcggtggtaatgcatggaagtatgattctgagacagatgaatattatttacatttatttgatgtcagtcaagctgatttaaattgggataatccggaagtacgtcaatcgttatatcgcatagtcaatcattggatagacttcggcgttgatggttttcgatttgatgtcattaacttaatttctaaaggtgaatttaaggactctgacaaaataggtaaagaattttatacggatggtcctagagtgcatgagtttctgcatgaattaaatcgtcaaacgtttggtaacactgacatgatgactataggagaaatgtcttcgacgacgattgaaaattgtattaagtatacacaaccagaacgccaagaattgaatagtgtttttaattttcatcatctaaaggttgattatgttgatggtgaaaagtggacaaatgcgaagcttgattttcataagttaaaggaaattctgatgcaatggcaacgaggtatttatgacggtggcggatggaacgcgattttctggtgtaatcatgatcagccacgggtagtgtctagatttggtgatgatacgtcggaagagatgaggatacaaagtgctaaaatgttagctatcgcactgcatatgttgcaagggacgccatatatttaccaaggtgaagaaattggtatgacggacccacattttacatcaatagcacaatatcgtgatgttgaatcgattaatgcctaccatcagttgttaagtgaagggcatgctgaagcggatgtgttagcgattttaggacagaagtcacgagacaattcgagaacgcctatgcaatggagtgatgatgttaatgctggatttacagctggtaagccttggattgatatttcggaaaattatcatcaggtcaacgttagacaagcacttcagaataaagagtctattttctatacgtatcaaaaattaatacaattaagacatacgcatgatattattacgtatggagacattgtgccacgttttatggatcatgatcatttatttgtttatgaacgtcattataagaatcaacaatggctagtaattgcgaatttctcagcatcggctgttgatttgccagaaggattggctagagaaggttgtgttgtgattcaaacaggcacagtggaaaataatacgataagcgggtttggtgcaattgtaatcgaaacaaacgcgtaaaataaattgagtggatgcgtttatatggcgaaacaaaaaaagtttatgaagatttatgaggcgttgaaagaagatatattaaacgggcagattcaatatggtgaacaaattccgtctgaacatgatttggtgcaattgtaccagtcatctcgagagaccgtgcgtaaggcattagatttgttggcattagacggcatgattcaaaagattcatggtaaagggtcacttgtcatttatcaggaggttacagagtttccattttctgaacttgttagttttaaagaaatgcaagaagaaatgggcgtcgcatatttaactgaagttgttgtgaatgaggttgttgaagcgcatgaagttccagaagttcaacatgctttaaacatcaattctagtgaatcactcattcatattgttagaactcgtcggcttaaccaacatgtgaagattgttgatgaagattattttctaaagtcgattgtttcagatataggtaatgatgttgcgagtgattctatttatgattatttggaaaaggtattaaatcttaatattagttattcaagtaagtctattacttttgaaccgtttgatgaacaagcatatcaattgtttggtgatgtatcggtggcttattcagcaacagttcgaagtattgtgtatttagaaaatacaatgccgtttcaatataatatttcaaaacatcttgcaaatgaatttaaatttaatgacttctcaagacgtcgtataaagtaaacaatgatataaatgatttatacttgcaattaactattaaaatatagtaatatatatcttgccgtgctaggtggggaggtagcggttccctgtactcgaaatccgctttatgcgaggcttaattcctttgttgaggccgtatttttgcgaagtctgcccaaagcacgtagtgtttgaagatttcggtcctatgcaatatgaacccatgaaccatgtcaggtcctgacggaagcagcattaagtggatcatcatatgtgccgtagggtagccgagatttagctaacgactttggttacgttcgtgaattacgttcgatgcttaggtgcacggttttttattttttaaatattaaaccgattattaagagttgaaaatatataattatagaagctactttcttgaagacaattcagcgtattatacgtggaacatgtttgtgggaagtagcttttttatatgtgaagtttgattcaagtgaactcgatgtgcagtttgaatgatttttgtgtcaatgaaaagtaagaagttataatttgatgataaagaaatgatggtgaaatgagggggagtatcttacaatagaattattaatgagatacgttatgattattgacaatcaaatgcctacggaggacatatgcaaatatatttaagtactttaacagagttagattatgataaatctttaaatagtattgaagaaagttttgatgataatcctgaaacgagttggcaagcacgtgcgaaagtaaaacatttaagaaaatctccttgctataattttgaattagaagtaatagcgaaaaatgaaaataacgatgtcgttggacacgttttattaattgaagtagaaattaatagtgatgataagacgtattatggtttggcgattgcctctttatcagttcatcctgaattacgtggacaaaaattaggtcgtggcttggttcaagcagtagaagagcgtgccaaagcacaagagtatagtacggttgttgtagaccattgttttgactactttgaaaagttgggttatcaaaatgctgctgagcatgacattaaattagaatctggtgatgcaccgttacttgtaaaatatttatgggataatttgacggatgcaccacacggaatcgtaaaatttccagaacatttttattaattgttcaattaagaagtaaaggtattatcatgctataatgagaggtaattgtttatggaggtgctaacttgaattatcaagccttatatcgtatgtacagaccccaaagtttcgaggatgtcgtcggacaagaacatgtcacgaagacattgcgcaatgcgatttcgaaagaaaaacagtcgcatgcttatatttttagtggtccgagaggtacggggaaaacgagtattgccaaagtgtttgctaaagcaatcaactgtctaaatagcactgatggagaaccttgtaatgaatgtcatatttgtaaaggcattacgcaggggactaattcagatgtgatagaaattgatgctgctagtaataatggggttgatgaaataagaaatattagagacaaagttaaatatgcaccaagtgaatcgaaatataaagtttatattatagatgaggtgcacatgctaacaacaggtgcttttaatgcccttttaaagacgttagaagaacctccagcacacgctatttttatattggcaacgacagaaccacataaaatccctccaacaatcatttctagggcacaacgttttgattttaaagcaattagcctagatcaaattgttgaacgtttaaaatttgtagcagatgcacaacaaattgaatgtgaagatgaagccttggcatttatcgctaaagcgtctgaagggggtatgcgtgatgcattaagtattatggatcaggctattgcatttggtgatggtacgttaacattgcaagatgcgttgaatgtcacaggtagcgtacatgatgaagcgttggatcacttgtttgatgatattgtacaaggtgacgtacaagcatcttttaaaaaataccatcagtttataacagaaggtaaagaagtgaatcgcctaataaatgatatgatttattttgtcagagatacgattatgaataaaacatctgagaaagatactgagtatcgagcactgatgaacttagaattagatatgttatatcaaatgattgatcttattaatgatacattagtgtcgattcgttttagtgtgaatcaaaacgttcattttgaagtgttgttagtaaaattagctgagcagattaagggtcaaccacaagtgattgcgaatgtagctgaaccagcacaaattgcttcatcgccaaacacagatgtattgttgcaacgtatggaacagttagagcaagaactaaaaacactaaaagcacaaggagtgagtgtcgctcctgttcaaaaatcttcgaaaaagcctgcgagaggcatacaaaaatctaaaaatgcattttcaatgcaacaaattgcaaaagtgctagataaagcgaataaggcagatatcaaattgttgaaagatcattggcaagaagtgattgatcatgccaaaaataatgataaaaaatcactcgttagtttattgcaaaattcggaacctgtggcggcaagtgaagatcacgtacttgtgaaatttgaggaagagatccattgtgaaatcgtcaataaagacgacgagaaacgtagtagtatagaaagtgttgtatgtaatatcgttaataaaaacgttaaagttgttggtgtaccatcagatcaatggcaaagagttcgaacggaatatttacaaaatcgtaaaaacgaaggcgatgatatgccaaagcaacaagcacaacaaacagatattgctcaaaaagcaaaagatcttttcggtgaagaaactgtacatgtgatagatgaagagtgatacatgacaagcgatataatcgtatgtataatgaaagaaacatcattttattgataaatatttattgattttcaaggaggaaatggaatatgcgcggtggcggaaacatgcaacaaatgatgaaacaaatgcaaaaaatgcaaaagaaaatggctcaagaacaagaaaaacttaaagaagagcgtattgtaggaacagctggcggtggcatggttgcagttactgtaactggtcataaagaagttgtcgacgttgaaatcaaagaagaagctgtagacccagacgatattgaaatgctacaagacttagtgttagcagctactaatgaagcgatgaataaagctgatgagcttactcaagaacgtttaggtaaacatactcaaggcttaaacatccctggaatgtgatcatagatgcattatccagaacctatatcaaaacttattgatagctttatgaaattgccaggcattggtccaaagacagcccaacgtctggcttttcataccttagatatgaaagaagacgatgttgttcagtttgccaaagcattagtagatgttaagagagaattaacatattgtagcgtatgtggtcacattactgaaaatgatccatgttatatttgtgaagataagcaaagagatcgttcagttatttgtgttgtggaagatgacaaagatgtcatagctatggaaaaaatgagagaatacaaaggtttatatcacgttttacatgggtctatttcgcctatggatggcattggaccagaagatattaatattccttcattgattgaacgcttgaaaaacgatgaagttagcgaattaatcttagctatgaacccgaacttagagggggaatctacagccatgtatatttctagattagttaagcctataggtatcaaagtgacgagattagcacaagggttatcggtaggtggcgatttagagtatgctgacgaagtaacattatctaaagcaatcgcaggtagaacagaaatgtaatgtcttctattaaacatttttgattttaatactatagtaagaaaagtcacagtgtaatcattgtggctttttttatggtgtggtgtgatgtactactttatttgcggtgtggcggtggtatggtttacctagttttactgagggatgggtaatctttaggaagcaagccgttggttgtgatttgttacttctaatagtaatgatgtgaattggattatcgaattagatctatggttatggtgtgttggtgctattaatttgataaatgcggttaatgactatgcaaatgaaattcttttgtaattgaaatgatagatgctggcttagtaagttgtacttctttggtctaaagcttattaaatcagcctgtatagcggtgttttgagagattatttaaaacttgtaaatttatttttaatttctggtaaaaaaataacgttctgttttgcgttttttttgattgatatggttagagaaaaatctgtttcttgttctaaaaaacgtactatttataagtggggattttttaagttcgattcttaggataagggcgttcagtacagatgacaaaggtgtaatttttactgttgttaagcagtttgaaagcctgtatagtatttatttgttgaggcaaacaaaacaactcaacttaagaaataacttgaattactaacgaaaattaattttaaaaagttattgacttaaatgttaataaaatgtataattaattcttgtcggtaagaaaaatgaacattgaaaactgaatgacaatatgtcaacgttaattccaaaaaacgtaactataagttacaaacattatttagtatttatgagctaatcaaacatcataatttttatggagagtttgatcctggctcaggatgaacgctggcggcgtgcctaatacatgcaagtcgagcgaacggacgagaagcttgcttctctgatgttagcggcggacgggtgagtaacacgtggataacctacctataagactgggataacttcgggaaaccgtagctaataccggataatattttgaaccgcatggttcaaaagtgaaagacggtcttgctgtcacttatagatggatccgcgctgcattagctagttggtaaggtaacggcttaccaaggcaacgatgcatagccgacctgagagggtgatcggccacactggaactgagacacggtccagactcctacgggaggcagcagtagggaatcttccgcaatgggcgaaagcctgacggagcaacgccgcgtgagtgatgaaggtcttcggatcgtaaaactctgttattagggaagaacatatgtgtaagtaactgtgcacatcttgacggtacctaatcagaaagccacggctaactacgtgccagcagccgcggtaatacgtaggtggcaagcgttatccggaattattgggcgtaaagcgcgcgtaggcggttttttaagtctgatgtgaaagcccacggctcaaccgtggagggtcattggaaactggaaaacttgagtgcagaagaggaaagtggaattccatgtgtagcggtgaaatgcgcagagatatggaggaacaccagtggcgaaggcgactttctggtctgtaactgacgctgatgtgcgaaagcgtggggatcaaacaggattagataccctggtagtccacgccgtaaacgatgagtgctaagtgttagggggtttccgccccttagtgctgcagctaacgcattaagcactccgcctggggagtacgaccgcaaggttgaaactcaaaggaattgacggggacccgcacaagcggtggagcatgtggtttaattcgaagcaacgcgaagaaccttaccaaatcttgacatcctttgacaactctagagatagagccttccccttcgggggacaaagtgacaggtggtgcatggttgtcgtcagctcgtgtcgtgagatgttgggttaagtcccgcaacgagcgcaacccttaagcttagttgccatcattaagttgggcactctaagttgactgccggtgacaaaccggaggaaggtggggatgacgtcaaatcatcatgccccttatgatttgggctacacacgtgctacaatggacaatacaaagggcagcgaaaccgcgaggtcaagcaaatcccataaagttgttctcagttcggattgtagtctgcaactcgactacatgaagctggaatcgctagtaatcgtagatcagcatgctacggtgaatacgttcccgggtcttgtacacaccgcccgtcacaccacgagagtttgtaacacccgaagccggtggagtaaccttttaggagctagccgtcgaaggtgggacaaatgattggggtgaagtcgtaacaaggtagccgtatcggaaggtgcggctggatcacctcctttctaaggatatattcggaacatcttcttcagaagatgcggaataacgtgacatattgtattcagttttgaatgtttatttaacattcaaatattttttggttaaagtgatattgcttatgaaaataaagcagtatgcgagcgcttgactaaaaagaaattgtacattgaaaactagataagtaagtaaaatatagattttaccaagcaaaaccgagtgaataaagagttttaaataagcttgaattcataagaaataatcgctagtgttcgaaagaacactcacaagattaataacgcgtttaaatctttttataaaagaacgtaacttcatgttaacgtttgacttataaaaatggtggaaacatagattaagttattaagggcgcacggtggatgccttggcactagaagccgatgaaggacgttactaacgacgatatgctttggggagctgtaagtaagctttgatccagagatttccgaatggggaaacccagcatgagttatgtcatgttatcgatatgtgaatacatagcatatcagaaggcacacccggagaactgaaacatcttagtacccggaggaagagaaagaaaattcgattcccttagtagcggcgagcgaaatgggaagagcccaaaccaacaagcttgcttgttggggttgtaggacactctatacggagttacaaaggacgacattagacgaatcatctggaaagatgaatcaaagaaggtaataatcctgtagtcgaaaatgttgtctctcttgagtggatcctgagtacgacggagcacgtgaaattccgtcggaatctgggaggaccatctcctaaggctaaatactctctagtgaccgatagtgaaccagtaccgtgagggaaaggtgaaaagcaccccggaaggggagtgaaatagaacctgaaaccgtgtgcttacaagtagtcagagcccgttaatgggtgatggcgtgccttttgtagaatgaaccggcgagttacgatttgatgcaaggttaagcagtaaatgtggagccgtagcgaaagcgagtctgaatagggcgtttagtatttggtcgtagacccgaaaccaggtgatctacccttggtcaggttgaagttcaggtaacactgaatggaggaccgaaccgacttacgttgaaaagtgagcggatgaactgagggtagcggagaaattccaatcgaacctggagatagctggttctctccgaaatagctttagggctagcctcaagtgatgattattggaggtagagcactgtttggacgaggggcccctctcgggttaccgaattcagacaaactccgaatgccaattaatttaacttgggagtcagaacatgggtgataaggtccgtgttcgaaagggaaacagcccagaccaccagctaaggtcccaaaatatatgttaagtggaaaaggatgtggcgttgcccagacaactaggatgttggcttagaagcagccatcatttaaagagtgcgtaatagctcactagtcgagtgacactgcgccgaaaatgtaccggggctaaacatattaccgaagctgtggattgtcctttggacaatggtaggagagcgttctaagggcgttgaagcatgatcgtaaggacatgtggagcgcttagaagtgagaatgccggtgtgagtagcgaaagacgggtgagaatcccgtccaccgattgactaaggtttccagaggaaggctcgtccgctctgggttagtcgggtcctaagctgaggccgacaggcgtaggcgatggataacaggttgatattcctgtaccacctataatcgttttaatcgatggggggacgcagtaggataggcgaagcgtgcgattggattgcacgtctaagcagtaaggctgagtattaggcaaatccggtactcgttaaggctgagctgtgatggggagaagacattgtgtcttcgagtcgttgatttcacactgccgagaaaagcctctagatagaaaataggtgcccgtaccgcaaaccgacacaggtagtcaagatgagaattctaaggtgagcgagcgaactctcgttaaggaactcggcaaaatgaccccgtaacttcgggagaaggggtgctctttagggttaacgcccagaagagccgcagtgaataggcccaagcgactgtttatcaaaaacacaggtctctgctaaaccgtaaggtgatgtataggggctgacgcctgcccggtgctggaaggttaagaggagtggttagcttctgcgaagctacgaatcgaagccccagtaaacggcggccgtaactataacggtcctaaggtagcgaaattccttgtcgggtaagttccgacccgcacgaaaggcgtaacgatttgggcactgtctcaacgagagactcggtgaaatcatagtacctgtgaagatgcaggttacccgcgacaggacggaaagaccccgtggagctttactgtagcctgatattgaaattcggcacagcttgtacaggataggtaggagcctttgaaacgtgagcgctagcttacgtggaggcgctggtgggatactaccctagctgtgttggctttctaacccgcaccacttatcgtggtgggagacagtgtcaggcgggcagtttgactggggcggtcgcctcctaaaaggtaacggaggcgctcaaaggttccctcagaatggttggaaatcattcatagagtgtaaaggcataagggagcttgactgcgagacctacaagtcgagcagggtcgaaagacggacttagtgatccggtggttccgcatggaagggccatcgctcaacggataaaagctaccccggggataacaggcttatctcccccaagagttcacatcgacggggaggtttggcacctcgatgtcggctcatcgcatcctggggctgtagtcggtcccaagggttgggctgttcgcccattaaagcggtacgcgagctgggttcagaacgtcgtgagacagttcggtccctatccgtcgtgggcgtaggaaatttgagaggagctgtccttagtacgagaggaccgggatggacatacctctggtgtaccagttgtcgtgccaacggcatagctgggtagctatgtgtggacgggataagtgctgaaagcatctaagcatgaagcccccctcaagatgagatttcccaacttcggttataagatccctcaaagatgatgaggttaataggttcgaggtggaagcatggtgacatgtggagctgacgaatactaatcgatcgaagacttaatcaaaataaatgttttgcgaagcaaaatcacttttacttactatctagttttgaatgtataaattacattcatatgtctggtgactatagcaaggaggtcacacctgtttccatgccgaacacagaagttaagctccttagcgtcgatggtagtcgaacttacgttccgctagagtagaacgttgccaggcaaaaaatggatgcgatgagccgcattgagaccgcaaggtctctttttttatgtctaaaacgtcaaaataaaaagcaaacacaaagaaaaatggcttggcgaagtgaaaacgtttgaatctgacgaaacgagaaaagagcgcaacgagtttagtagagctaaatgagtaagcgagagccgaagaagaggaaagaagcaagcgattgtcacaagtcaagaaaggtctttagcgacgatggtagccaacttacgttccgctagagtagaacgttgccaggcaagttgagaccgtgaggtctctttttttatgtctaaaacgtcaaaataaaaagtaaacacaaagaaaaatggcttggcgaagtgaaaacgtttgaatctgacgaaacgagaaaagagcgcaacgagtttagtagagctaaatgagtaagcgagagccgaaggagaggaaagaagcaagcgattgtcacaagtcaagaaaggttcttagcgaggatggtagctaacttacgttccgctagagtagaacgttgctagacaagaaatgaatgcgatgagccgcattgagtgtgaaattgatattttaataatgtgcacttttgattatttaaatctgtgactagaagtataagtgaagacattcagaagtattataaaaagtgaacagcagtaagatagtttttaatcataaatcatcttactgctgtttttagattttatgtctaatatcttttaaatcgaagtacaaaaaggaaattaattattatacaatagacaagctattgcataagtaacactaacttttgtcaaagaagtgttactatataattaatacttttgaaagtaactaattccaaaacagtgtaaataaaggaagcgtatatcatgaagcaacctattttaaataaattagaaagtttaaatcaagaagaagcgatttctttgcatgttccgggtcataaaaatatgactatcggtcatttatctcaattatcaatgacaatggataaaactgaaatacctggattagatgatttacatcatcctgaagaagtcattttggaaagtatgaagcaggtggagaaacattcagattatgatgcttatttcttagtgaatggcaccacttcaggaatattatctgtcatccagtctttttcacagaaaaaaggcgatatcttaatggcaagaaatgtacataaatctgtgttacatgcgctcgatattagccaacaagaagggcattttattgaaacgcatcaaagtccgttaacgaatcattataataaagttaatttaagccgtttgaataatgacggtcacaaacttgctgtgttgacttatcctaactattacggtgaaacatttaatgtagaagaggttatcaaatttttgcaccaattaaatattcctgtactcattgacgaagcacacggcgcgcactttggattgcaaggatttccagattctacattaaattatcaagctgactatgttgttcaatcttttcataaaacgttaccagctttaacgatgggctcggtactttatattcataaaaatgcaccttatagagaaactattatagaatatctaagctacttccaaacatctagtccttcgtatttgattatggctagtttagagtcagctgccgagttctataaaacatatgatagtaccgtgttttttgataagagagcgcaattaatcgaatgtttggagaagaagggttttgaaatgcttcaagttgatgatccgttgaagttgctgataaaatatgaaggttttacaggtcatgatattcaaaattggtttatgaatgcacatatctatttagaattagcggacgactatcaagcattagcgatattgccgttatggcatcatgatgatacgtatttatttgattcgcttttacgtaaaattgaagatatgattttaccgaaaaaatcagtttctaaagttaaacaaacacaacttttaacaactgaaggtaactataaaccaaaacgctttgaatatgttacttggtgtgatttgaaaaaggcaaaaggtaaagttctggcgcgacatattgtcccgtatccgccagggattcctattattttcaaaggagaaacaataactgaaaatatgatagaattggtaaatgaatatctggaaactggaatgatagttgaaggaattaaaaataataaaattttagttgaggatgaataaaatgtcagcttttataacttttgagggcccagaaggctctggaaaaacaactgtaattaatgaagtttaccatagattagtaaaagattatgatgtcattatgactagagaaccaggtggtgttcctactggtgaagaaatacgtaaaattgtattagaaggcaatgatatggacattagaactgaagcaatgttatttgctgcatctagaagagaacatcttgtattaaaggtcataccagctttaaaagaaggtaaggttgtgttgtgtgatcgctatatcgatagttcattagcttatcaaggttatgctagagggattggcgttgaagaagtaagagcattaaacgaatttgcaataaatggattatatccagacttgacgatttatttaaatgttagtgctgaagtaggtcgcgaacgtattattaaaaattcaagagatcaaaatagattagatcaagaagatttaaagtttcacgaaaaagtaattgaaggttaccaagaaatcattcataatgaatcacaacggttcaaaagcgttaatgcagatcaacctcttgaaaatgttgttgaagacacgtatcaaactatcatcaaatatttagaaaagatatgatataattgttagaagaggtgttataaaatgaaaatgattatagcgatcgtacaagatcaagatagtcaggaacttgcagatcaacttgttaaaaataactttagagcaacaaaattggcaacaacaggtgggtttttaagagcgggtaatacaacattcttatgtggtgtcaatgatgaccgtgtagatgaaatattgtctgtgattaatcaaacgtgtggtaatagagaacagttggtttcacctattacacctatgggaggcagtgcggattcgtacattccatatccagttgaagttgaagttggcggtgctactgtatttgttatgccagttgatgcattccatcaattttaattctataatacaatcatcaattagagatacttaaaatagtgtattaataagttattaacaattttgggttgcttgactgcgactagttcagatgccaatagatttgatttttgtggttctaaaaataatcacaaatcatggtcgctattgttgcagtaattagttgctctttggcaacctttttatataaaagcaaaagggagtttgtaatgaatggatgaacagcaacaattgacgaatgcatatcattcaaataaattatcgcatgcctatttatttgaaggtgatgatgcacaaacgatgaaacaagttgcgattaattttgcaaagcttattttatgtcaaacagatagtcaatgtgaaacaaaggttagtacatataatcatccagactttatgtatatatcaacaactgagaatgcaattaagaaagaacaagttgaacaacttgtgcgtcatatgaatcaacttcctatagaaagcacaaataaagtgtacatcattgaagactttgaaaagttaactgttcaaggggaaaacagtatcttgaaatttcttgaagaaccaccggacaatacgattgctattttattgtctacaaaacctgagcaaattttagacacaatccattcaagatgtcagcatgtatatttcaagcctattgataaagaaaagtttataaatagattagttgaacaaaacatgtctaagccagtagctgaaatgattagtacttatactacgcaaatagataatgcaatggctttaaatgaagaatttgatttattagcattaaggaaatcagttatacgttggtgtgaattgttgcttactaataagccaatggcacttataggtattattgatttattgaaacaggctaaaaataaaaaactgcaatctttaactattgcagctgtgaatggtttcttcgaagatatcatacatacaaaggtaaatgtagaggataaacaaatatatagtgatttaaaaaatgatattgatcaatatgcgcaaaagttgtcgtttaatcaattaattttgatgtttgatcaactgacggaagcacataagaaattgaatcaaaatgtaaatccaacgcttgtatttgaacaaatcgtaattaagggtgtgagttagatgccaaatgtaataggtgttcagtttcaaaaagcgggaaaattagaatattatacacctaatgatatacaagtagatatagaagactgggtagttgtcgaatctaaaagaggcatagagataggtattgttaaaaatccattaatggatattgctgaagaggatgttgtgttacctcttaaaaatattattcgcattgctgatgacaaagatattgataaatttaattgtaatgaacgagatgctgaaaatgcattaatactatgtaaagacattgtaagagaacaaggtttggacatgcgtttagtcaattgcgaatatacattagataaatcgaaagttatttttaattttacggcggatgatcgtattgattttagaaaattagtaaaaatattagcgcaacatttaaaaacacgtatcgagttgagacaaattggtgtaagggatgaagccaaattgcttggcggtatcggaccttgtggtaggtcgttatgttgttctacatttttaggggattttgaaccagtatcgattaagatggctaaggatcaaaatttatcattaaatccaactaaaatttctggtgcatgtggtcgtttgatgtgttgtttaaaatatgaaaatgactattatgaggaagtacgtgcacaattacctgatattggtgaagcaattgaaacgcctgatggtaacgggaaagtagttgctttaaatatattagacatttctatgcaggtgaagcttgagggacatgaacagccacttgaatataaattagaagaaatagaaactatgcattaaggaggcattattacatttggatcgcaatgaaatatttgaaaaaataatgcgtttagaaatgaatgtcaatcaactttcaaaggaaacttcagaattaaaggcacttgcagttgaattagtagaagaaaatgtagcgcttcaacttgaaaatgataatttgaaaaaggtgttgggcaatgatgaaccaactactattgatactgcgaattcaaaaccagcaaaagctgtgaaaaagccattaccaagtaaagataatttggctatattgtatggagaaggatttcatatttgtaaaggcgaattatttggaaaacatcgacatggtgaagattgtctgttctgtttagaagttttaagtgattaatcaagcacactcaaatagtgttataattataaatgaatatggtttggataagtctgagacaatgcatgtttcaggctttaattgtgtataaagttttggtgattgcataagagatggcggtactaaatgttattattaagtgtgcacgcagtatcattagttataaaatgtagctgttaaaagtcaaaaatacatcgaatgtagttaggcatataatataaaaagagttttcaattactcaatagaaaaaggttgtcttcataggagttaaaaatgttaaaagagaatgaacgatttgatcaactaatcaaagaagattttagtattattcaaaatgatgatgttttttcattttcaacggatgctttgttgttagggcattttacaaaacctagaacaaaagatattgtgttggacttatgttcaggcaatggggtgatacccttgttattgtttgcgaaacatccacgacatatagaaggtgttgagattcaaaaaacacttgtcgatatggcgcgacgcacatttcaattcaatgatgttgatgaatatttaacaatgcatcacatggatttgaaaaacgttactaaagtatttaaaccttcacaatatactttagtaacgtgtaatccgccttattttaaagagaatcagcaacaccaacatcaaaaagaagcacataagatagcgagacatgagattatgtgtacacttgaagattgcatgattgcagcccgtcatttattaaaagaaggtggcaggctaaacatggtacatcgtgcagagagactaatggatgtcttgtttgaaatgagaaaagtgaatattgaacctaagaaagtcgtttttatatatagtaaagtagggaaatcagcacaaacgatagtagtagaaggtcgaaaaggtggaaatcaaggtttagaaatcatgcccccattttatatttataatgaagatggtaattatagcgaagaaatgaaggaagtatattatggatagtcattttgtatatattgtaaaatgtagtgatggaagtttatatacaggatacgctaaagacgttaatgcacgtgttgaaaaacataaccgaggtcaaggagccaaatatacgaaagtaagacgtccggtgcatttagtttatcaagaaatgtatgagacaaagtctgaagcattgaagcgtgaatatgaaattaaaacttataccagacaaaagaaattgcgattaattaaggagcgatagtatggctgtattatatttagtgggcacaccaattggtaatttagcagatattacttatagagcagttgatgtattgaaacgtgttgatatgattgcttgtgaagacactagagtaactagtaaactgtgtaatcattatgatattccaactccattaaagtcatatcacgaacataacaaggataagcagactgcttttatcattgaacagttagaattaggtcttgacgttgcgctcgtatctgatgctggattgcccttaattagtgatcctggatacgaattagtagtggcagccagagaagctaatattaaagtagagaccgtgcctggacctaatgctgggctgacggctttgatggctagtggattaccttcatatgtatatacatttttaggatttttgccacgaaaagagaaagaaaaaagtgctgtattagagcaacgtatgcatgaaaatagcacattaattatatacgaatcaccgcatcgtgtgacagatacattaaaaacaattgcaaagatagatgcaacacgacaagtatcactagggcgtgaattaactaagaagttcgaacaaattgtaactgatgatgtaacacaattacaagcattgattcagcaaggcgatgtaccattgaaaggcgaattcgttatcttaattgaaggtgctaaagcgaacaatgagatatcgtggtttgatgatttatctatcaatgagcatgttgatcattatattcaaacttcacagatgaaaccaaaacaagctattaaaaaagttgctgaagaacgacaacttaaaacgaatgaagtatataatatttatcatcaaataagttaatcactttatcgattatatgaaattttaaacgattttataaacgcaagctgtaattttaaatggtaagttatcattttgcattgatactgataaaatgatgttgactatgataaaaaaatgatgacatcgacgttttttaatgtaaaataaatacattgaaagtaataaataccttaacattgaataagatgaaaatgagatgacgagataaatgttcgcgtccgttgaaatgcatagaaatcttagatattatttgaagtgagacattacgaggaggaacagttatggctaaagaaacattttatataacaaccccaatatactatcctagtgggaatttacatataggacatgcatattctacagtggctggagatgttattgcaagatataagagaatgcaaggatatgatgttcgctatttgactggaacggatgaacacggtcaaaaaattcaagaaaaagctcaaaaatctggtaagacagaaattgaatatttggatgagatgattgctggaattaaacaattgtgggctaagcttgaaatttcaaatgatgattttatcagaacaactgaagaacgtcataaacatgtcgttgagcaagtgtttgaacgtttattaaagcaaggtgatatctatttaggtgaatatgaaggttggtattctgttccggatgaaacatactatacagagtcacaattagtagacccacaatacgaaaacggtaaaattattggtggcaaaagtccagattctggacacgaagttgaactagttaaagaagaaagttatttctttaatattagtaaatatacagaccgtttattagagttctatgaccaaaatccagattttatacaaccaccatcaagaaaaaatgaaatgattaacaacttcattaaaccaggacttgctgatttagctgtttctcgtacatcatttaactggggtgtccatgttccgtctaatccaaaacatgttgtttatgtttggattgatgcgttagttaactatatttcagcattaggctatttatcagatgatgagtcactatttaacaaatactggccagcagatattcatttaatggctaaggaaattgtgcgattccactcaattatttggcctattttattgatggcattagacttaccgttacctaaaaaagtctttgcacatggttggattttgatgaaagatggaaaaatgagtaaatctaaaggtaatgtcgtagaccctaatattttaattgatcgctatggtttagatgctacacgttattatctaatgcgtgaattaccatttggttcagatggcgtatttacacctgaagcatttgttgagcgtacaaatttcgatctagcaaatgacttaggtaacttagtaaaccgtacgatttctatggttaataagtactttgatggcgaattaccagcgtatcaaggtccacttcatgaattagatgaagaaatggaagctatggctttagaaacagtgaaaagctacactgaaagcatggaaagtttgcaattttctgtggcattatctacggtatggaagtttattagtagaacgaataagtatattgacgaaacaacgccttgggtattagctaaggacgatagccaaaaagatatgttaggcaatgtaatggctcacttagttgaaaatattcgttatgcagctgtattattacgtccattcttaacacatgcgccgaaagagatttttgaacaattgaacattaacaatcctcaatttatggaatttagtagtttagagcaatatggtgtgcttaatgagtcaattatggttactgggcaacctaaacctattttcccaagattggatagcgaagcggaaattgcatatatcaaagaatcaatgcaaccgcctgctactaaagaggaaaaagaagagattcctagcaaacctcaaattgatattaaagactttgataaagttgaaattaaggcagcaacgattattgatgctgaacatgttaagaagtcagataagcttttaaaaattcaagtagacttagattctgaacaaagacaaattgtatcaggaattgccaaattctatacaccagatgatattattggtaaaaaagtagcagttgttactaacctgaaaccagctaaattaatgggacaaaaatctgaaggtatgatattatctgctgaaaaagatggtgtattaaccttagtaagtttaccaagtgcaattccaaatggtgcagtgattaaataactgtatttttaaaaattaggagagataattatgttaatcgatacacatgtccatttaaatgatgagcaatacgatgatgatttgagtgaagtgattacacgtgctagagaagcaggtgttgatcgtatgtttgtagttggttttaacaaatcgacaattgaacgcgcgatgaaattaatcgatgagtatgattttttatatggcattatcggttggcatccagttgacgcaattgattttacagaagaacacttggaatggattgaatctttagctcagcatccaaaagtgattggtattggtgaaatgggattagattatcactgggataaatctcctgcagatgttcaaaaggaagtttttagaaagcaaattgctttagctaagcgtttgaagttaccaattatcattcataaccgtgaagcaactcaagactgtatcgatatcttattggaggagcatgctgaagaggtaggcgggattatgcatagctttagtggttctccagaaattgcagatattgtaactaataagctgaatttttatatttcattaggtggacctgtgacatttaaaaatgctaaacagcctaaagaagttgctaagcatgtgtcaatggagcgtttgctagttgaaaccgatgcaccgtatctttcgccacatccgtatagagggaagcgaaatgaaccggcgagagtaactttagtagctgaacaaattgctgaattaaaaggcttatcttatgaagaagtgtgcgaacaaacaactaaaaatgcagagaaattgtttaatttaaattcataaagttaaaagtgagaaagatcaccgccataaatgtaaacgatgctatattcgtttaatatgctatggttctttctcacttttttaaattaaaatatcgtgcatgtggaatacgtgcgatagagatggttagagctttgaaattaagaattgtaggaaggcgttttaaatgaaaatcaatgagtttatagttgtagaaggacgagatgatactgagcgtgttaaacgagctgttgaatgtgatacgattgaaacgaatggtagtgccatcaacgaacaaactttagaagtaattagaaatgctcaacaaagtcgaggcgttattgtattaacagatccagatttcccaggagataaaattagaagtacaattactgaacatgtcaaaggtgttaaacatgcgtatattgatagagaaaaagctaaaaataaaaaagggaaaattggtgttgaacatgccgaattaattgatattaaagaagcgttaatgcatgttagttcaccctttgatgaagcttatgaatcaattgataaatctgtgctaatagagttggggttaattgttgggaaagatgcaaggcgccgtagagaaattttaagtagaaaattgcgaatcggccattccaatggtaagcagttattgaaaaagttaaatgcatttggttataccgaagcggatgtaaggcaagctttagaagatgaatgaggaagtgaaaatgttggataataaagatattgcaacaccatcaagaacgcgagcgttgttagataaatatggctttaattttaaaaaaagtttaggacagaactttttgatagatgtgaatatcattaataatatcattgatgcaagtgatattgatgcacaaactggggtgattgaaattggtccaggcatggggtcattgacagaacaattggccagacatgctaaaagagtattggcatttgaaattgatcaacgtttaatacctgtattaaatgatacactatcaccttatgataatgtgacggtgattaatgaagatattttaaaagcgaatattaaagaagctgttgaaaatcatttacaagattgtgaaaaaataatggttgttgcaaacctgccgtactatattacgacgccaattttattaaatttgatgcaacaagatataccaattgatggctacgtggtgatgatgcaaaaagaagtgggcgaacgcttaaatgctgaagtaggttcaaaagcatatggttcgttatcaattgtcgtacaatactatacagagactagtaaagtattaacggtacctaaatctgtatttatgccaccacctaatgttgattcaatagttgtaaaactgatgcagagaactgaaccgttagtaacagtagataacgaggaagcattctttaagttagcaaaagcagcatttgcacaaagaagaaagacaattaacaataactatcaaaattattttaaagatggtaaacaacacaaagaagtgattttacaatggttggaacaagcaggtattgatccaagacgtcgcggtgaaacgctatctattcaagattttgctaaattgtatgaagaaaagaaaaaattccctcaattagaaaattaaatgattgacaaagcaaagcactattgttaaaatttaaattttgtttgacgaaaacgttgcaaatatggtattatgtaacttgtagcgaggtggagcaatatgccaaaatcaattttggacatcaaaaattctattgattgtcatgtaggaaatcgtattgtactgaaagccaatggaggccgtaagaaaacaataaaacgttctggaattttaaaagaaacatatccgtcagttttcattgttgagttagatcaagacaaacacaactttgagagagtatcttatacatacactgatgtgttaactgaaaatgttcaagtttcatttgaagaggataatcatcacgaatcaattgcacactaaataagacatatagagatgttagacgtttcttagtataagaagtaaatattatgataattatttgagtgttgggcattatgttcaatactctttttatttacaaaatgtttaacactgatgtttcgcttatagatttttcagtaaatggataattgtatttataaacacaaatacaagtaaatactaagtaattagatggagaaaattacttttttattaaaaaaacactaaaaaacaaattaaaatgtcaaatattaattctctttatgttaaaatcatcatattaagataacgaaaagagggcggaaaatgatatatgaaacggcaccagccaaaattaattttacgctcgatacactttttaaaagaaatgatggctatcatgagattgaaatgataatgacaacagttgatttaaatgatcgtttaacttttcataaaagaaaagatcgaaagatagttgttgagattgaacataattatgtgccttctaatcataaaaatctcgcatatcgtgcagcgcaactatttattgagcaatatcaactaaagcaaggtgtaacaatttctatcgataaagaaatacctgtttctgctggcttagctggaggttcggctgatgcagcagcaacgttaagaggattgaatcgactttttgatataggggcgagtttggaagaattggctctactaggcagtaaaatcgggacagatattccgttttgtatttataataaaactgcactatgtactggaagaggagagaaaatcgagtttttaaataaaccaccttcagcttgggtgattcttgctaaaccaaacttaggcatatcatcaccagatatatttaagttgattaatttagataagcgttacgacgtacatacgaaaatgtgttatgaggccttagaaaatcgagattatcaacaattatgtcaaagtttgtctaatcgattagagccaatttctgtttcaaaacacccacaaatcgataaattaaaaaataatatgttgaaaagtggtgcagatggtgcgttaatgagtggaagcggacctactgtgtatgggctagcacgaaaagaaagccaagcaaaaaatatttataatgcagttaacggttgttgtaatgaagtgtacttagttagactattaggatagaagggttgaaaagatgagatataaacgaagcgagagaattgtttttatgacgcaatatttgatgaaccatccgaataaattgattccattaactttttttgtgaaaaaatttaaacaggcgaagtcttcaataagtgaagatgtccaaattataaaaaatacattccaaaaagaaaagttaggtacagtaattactactgctggcgcaagtggtggtgttacgtataaaccaatgatgagtaaagaagaggcgactgaagttgttaatgaggtcattactctattagaagagaaagaacgtttgttacctggcggatatttatttttatcagatttggtaggtaatccatcgctactaaacaaagttggtaagttaattgccagtatttacatggaagaaaaattagatgctgttgttaccattgcgacaaaaggtatttcattggcaaatgcggttgctaatattttaaatttaccagtagtagtgattagaaaagacaacaaggtgactgaaggttctacagtttcaattaattacgtttcaggatcttcaagaaaaatagaaacaatggtactttcgaagagaactttagcagaaaattcaaatgttttagttgtcgatgattttatgagggctggtggctctattaatggtgttatgaatttaatgaatgagtttaaagcccatgtaaaaggggtatcagtacttgtagaatcaaaagaagttaaacaaagattgattgaagattatacttccttagtgaaattatctgatgtagatgaatataatcaagagtttaacgtagaacctggcaacagtttatctaagttttcataaaaggagttttagtattatgaaaatcattaacacaacaagattaccggaagcacttggaccatattcgcatgcaacagttgtgaatggtatggtttatacttctggtcagattccattgaatattgatggacatatcgtaagcgctgatgttcaagcacagacaaaacaagttttagaaaatttaaaggttgttttggaagaagcaggatctgatttgaattctgttgcgaaagcgaccattttcattaaagatatgaatgatttccaaaaaataaatgaagtgtatggtcaatattttaatgaacacaagccagcgcgtagttgtgtagaggttgcgcgtttgccaaaagatgtgaaagtagaaattgaattagtaagtaaaattaaggaattataattttcgattaatatgtttaatcaagcttctaaataaaacagagagatatatactataggggggctcactacatgaaagtgacagatgtaagacttagaaaaatacaaacagatggacgaatgaaagcactcgtttccattacattagatgaagctttcgtaattcatgatttacgtgtaattgaaggaaactctggcttgttcgttgcaatgccaagtaaacgtacaccagatggtgaattccgcgacatcgcgcatcctattaattcagatatgagacaagaaattcaagatgcagtgatgaaagtatatgatgaaacagatgaagtagtaccagataaaaacgctacatcagaagattcagaagaagcttaatcaattttatatttagcgatgtaatacatttgcaataagttgatttgatactgtcgataaagcataaagctttgtcggcagtttttttagtttgtattaatgtttttttatttttaatgaaaggctaataaatatatacgttaacagattatgatgatatgaaaattattgattcattgctgataaaaattgcgtttgaatgatgctcgtatttttgaagtaagaaaaaagttgtttttaaaattacaacgaattaaaaacaatgccttttatatgttgaaagagtattgcagattaaattataataatgacgaagtgtaaaatttaatgggggttaatgttcatgcgaagacacgcgataattttggcagcaggtaaaggcacaagaatgaaatctaaaaagtataaagtgctacacgaggttgctgggaaacctatggtcgaacatgtattggaaagtgtgaaaggctctggtgtcgatcaagttgtaaccatcgtaggacatggtgctgaaagtgtaaaaggacatttaggcgagcgttctttatacagttttcaagaggaacaactcggtactgcgcatgcagtgcaaatggcgaaatcacacttagaagacaaggaaggtacgacaatcgttgtatgtggtgacacaccgctcatcacaaaggaaacattagaaacattgattgcgcatcacgaggatgctaatgctcaagcaactgtattatctgcatcgattcaacaaccatatggatacggaagaatcgttcgaaatgcgtcaggtcgtttagaacgcatagttgaagagaaagatgcaacgcaagctgaaaaggatattaatgaaattagttcaggtatttttgcgtttaataataaaacgttgtttgaaaaattaacacaagtgaaaaatgataatgcgcaaggtgaatattacctccctgatgtattgtcgttaattttaaatgatggcggcatcgtagaagtctatcgtaccaatgatgttgaagaaatcatgggtgtaaatgatcgtgtaatgcttagtcaggctgagaaggcgatgcaacgtcgtacgaatcattatcacatgctaaatggtgtgacaatcatcgatcctgacagcacttatattggtccagacgttacaattggtagtgatacagtcattgaaccaggcgtacgaattaatggtcgtacagaaattggcgaagatgttgttattggtcagtactctgaaattaacaatagtacgattgaaaatggtgcatgtattcaacagtctgttgttaatgatgctagcgtaggagcgaatactaaggtcggaccgtttgcgcaattgagaccaggcgcgcaattaggtgcagatgttaaggttggaaattttgtagaaattaaaaaagcagatcttaaagatggtgccaaggtttcacatttaagttatattggcgatgctgtaattggcgaacgtactaatattggttgcggaacgattacagttaactatgatggtgaaaataaatttaaaactatcgtcggcaaagattcatttgtaggttgcaatgttaatttagtagcacctgtaacaattggtgatgatgtattggtggcagctggttccacaatcacagatgacgtaccaaatgacagtttagctgtggcaagagcaagacaaacaacaaaagaaggatataggaaataatcatttacgtatttaaaatggctaggataaaaggataatcctatgtaatattaatgtaatctttatgatttaatgattcgcatagtaatggagttacattttatatataatagtaattgcgtaagtaaataattggaggactataaatgttaaataatgaatataagaattcgtcattaaagattttttcattgaaaggaaacgaagcattagcgcaagaagttgctgaccaagtaggaattgaactaggtaaatgttcagttaaacgttttagtgatggagaaattcaaattaatatcgaagagagtattcgtggttgtgacgtatttattattcaaccaacatcatatcctgtgaatctacatttaatggaattattaattatgattgatgcttgtaaacgtgcttctgcagcaacaatcaatattgtagtgccatattatggatatgcaagacaagatagaaaagcccgtagccgtgagccaatcactgctaaattagttgcaaacttaatcgaaacagctggcgcaactcgtatgattgcgttagacttacatgcaccacaaattcaaggattctttgatattccaattgaccacttaatgggtgtgccaattcttgctaaacatttcaaagatgatccgaatattaacccagaagaatgtgtcgttgtttcaccagaccatggcggcgttacacgtgcacgtaaattagctgacattttaaaaactccaattgcaattatagataaacgtcgtcctagaccaaatgttgctgaagtgatgaacattgttggtgagattgaaggacgtacggcaattattattgacgatattattgatacagcaggtacaatcactttagctgcacaagcattaaaagataaaggtgctaaagaagtatatgcttgttgtacacaccctgttttatcaggaccggctaaagaacgtatcgaaaattctgctataaaagaattaatcgtaacaaactcaattcatttagatgaagatcgcaaaccatctaacactaaagaattatctgttgctggtttaatcgcacaagctatcattcgtgtatacgaaagagaatcagttagcgtattatttgactaatatttaaaaggcgtttgacgaacatattccaaacgtgtataatagtttcgttcgtgattatacgaataaataaacacttgcaagcaacgatgatgttgatgggtaagtgaggtgctcgttttgagcaaaaatgaaaggtggaaatgagaatggcttcattaaagtcaatcatccgtcaaggtaaacaaacacgttcagatcttaaacaattaagaaaatctggtaaagtaccagcagtagtatacggttacggtactaaaaacgtgtcagttaaagttgatgaagtagaattcatcaaagttatccgtgaagtaggtcgtaacggtgttatcgaattaggcgttggttctaaaactatcaaagttatggttgcagactaccaattcgatccacttaaaaaccaaattactcacattgacttcttagcaatcaatatgagtgaagaacgtactgttgaagtaccagttcaattagttggtgaagcagtaggcgctaaagaaggcggcgtagttgaacaaccattattcaacttagaagtaactgctactccagacaatattccagaagcaatcgaagtagacattactgaattaaacattaacgacagcttaactgttgctgatgttaaagtaactggcgacttcaaaatcgaaaacgattcagctgaatcagtagtaacagtagttgctccaactgaagaaccaactgaagaagaaatcgaagctatggaaggcgaacaacaaactgaagaaccagaagttgttggcgaaagcaaagaagacgaagaaaaaactgaagagtaattttaatctgttacattaaagtttttatactttgtttaacaagcactgtgcttattttaatataagcatggtgctttttgtgttattataaagcttaattaaactttattactttgtactaaagtttaattaattttagtgagtaaaagacattaaactcaacaatgatacatcataaaaattttaatgtactcgattttaaaatacatacttactaagctaaagaataatgataattgatggcaatggcggaaaatggatgttgtcattataataataaatgaaacaattatgttggaggtaaacacgcatgaaatgtattgtaggtctaggtaatataggtaaacgttttgaacttacaagacataatatcggctttgaagtcgttgattatattttagagaaaaataatttttcattagataaacaaaagtttaaaggtgcatatacaattgaacgaatgaacggcgataaagtgttatttatcgaaccaatgacaatgatgaatttgtcaggtgaagcagttgcaccgattatggattattacaatgttaatccagaagatttaattgtcttatatgatgatttagatttagaacaaggacaagttcgcttaagacaaaaaggaagtgcgggcggtcacaatggtatgaaatcaattattaaaatgcttggtacagaccaatttaaacgtattcgtattggtgtgggaagaccaacgaatggtatgacggtacctgattatgttttacaacgcttttcaaatgatgaaatggtaacgatggaaaaagttatcgaacacgcagcacgcgcaattgaaaagtttgttgaaacatcacgatttgaccatgttatgaatgaatttaatggtgaagtgaaataatgacaatattgacaacgcttataaaagaagataatcattttcaagaccttaatcaggtatttggacaagcaaacacactagtaactggtctttccccgtcagctaaagtgacgatgattgctgaaaaatatgcacaaagtaatcaacagttattattaattaccaataatttataccaagcagataaattagaaacagatttacttcaatttatagatgctgaagaattgtataagtatcctgtgcaagatattatgaccgaagagttttcaacacaaagccctcaactgatgagtgaacgtattagaactttaactgcgttagctcaaggtaagaaagggttatttatcgttcctttaaatggtttgaaaaagtggttaactcctgttgaaatgtggcaaaatcaccaaatgacattgcgtgttggtgaggatatcgatgtggaccaatttcttaacaaattagttaatatggggtacaaacgggaatccgtggtatcgcatattggtgaattctcattgcgaggaggtattatcgatatctttccgctaattggggaaccaatcagaattgagctatttgataccgaaattgattctattcgggattttgatgttgaaacgcagcgttccaaagataatgttgaagaagtcgatatcacaactgcaagtgattatatcattactgaagaagtgatcagccatcttaaagaagagttaaaaactgcatatgaaaatacaagacccaaaatagataaatcagtgcgcaatgatttgaaagaaacgtatgaaagctttaaattattcgaaagtacatactttgatcatcaaatactacgtcgcttagtagcgtttatgtatgaaacaccttcgacaattattgagtatttccaaaaagatgcaatcattgcagttgatgaatttaatcgtattaaagaaactgaagaaagtttaacagtagagtctgattcgtttattagcaatattattgaaagtggtaatggatttataggacaaagttttataaaatatgatgattttgaaacattgattgaaggctatcctgtcacttatttttcattattcgctacaacaatgccgataaaactaaatcatattattaaattttcatgtaaacctgtccaacaattttatgggcaatatgacattatgcgttctgaatttcaacgatatgttaatcaaaactatcatatcgtggttttggtcgaaaccgaaactaaagttgaacgtatgcaagcgatgttaagtgaaatgcatattccatcaataacaaaattgcatcgctcaatgtcatcggggcaagcagtgattattgaaggcagtttatctgaaggatttgaactacctgatatgggattagttgtcattactgagcgtgagctttttaaatcaaaacagaaaaagcaacgaaaacgtacgaaagctatctcaaatgctgaaaaaattaagtcttaccaagatttaaatgtgggagattatattgttcatgtgcatcatggtgttggtagatatttaggtgttgagacgctcgaagtggggcaaacgcatcgtgattatattaaattgcaatataaaggtacggatcaactatttgttccagtagatcaaatggatcaagttcaaaaatatgtagcttcggaagataagacgccaaaattaaataaactcggtggcagtgaatggaaaaaaacaaaagctaaagttcaacaaagtgttgaagatattgctgaagagttgattgatttatataaagaaagagaaatggcagaaggttatcaatatggggaagacacagctgagcaaacaacatttgaattagattttccatatgaacttacgcctgaccaagctaaatctatcgatgaaattaaagatgacatgcaaaaatcgcgtccaatggatcgcttgctatgtggtgatgttggttatggtaaaactgaagttgcagtgagagcagcattcaaagctgtaatggaaggaaagcaggttgcatttttagttcctacaactattttagctcagcaacattatgagacgttaattgagcgtatgcaagattttcctgttgaaattcaattaatgagtcgttttagaacgcctaaagagataaaacaaactaaggaaggacttaaaactggatttgttgacatagttgttggtacacacaaattacttagtaaagatatacagtataaagatttagggctgttgattgtagatgaagaacaacgatttggtgtacgccataaagagcgtattaaaacattaaaacataatgtagatgtactaacattgactgcaaccccaatacctagaacattgcatatgagtatgctaggtgtgcgggatttgtcagtgattgaaacgccgccagaaaatcgtttcccagttcaaacatatgtattagaacagaacatgagttttatcaaagaagctttagaaagagaactatcccgtgatggccaagtgttttatctttataataaagtgcaatccatttatgaaaaacgagaacaactccagatgttaatgccagatgctaacattgcagttgctcatggacaaatgacagagcgcgatttagaagaaacgatgttaagttttatcaataatgaatatgatattttagtaacgacgacgattattgaaacaggtgtcgatgtcccaaatgcaaatactttgatcattgaagatgcagatcgctttggattgagtcagttgtatcaattaagaggtcgtgttggtcgttcaagtcgtattggttatgcatacttcttacatccagcaaataaggtactaactgagactgcagaagatcgattacaagcgattaaagaatttacggagttaggctcaggatttaagattgcgatgcgtgatttgaacattcgtggtgctggtaatttgttaggtaaacaacagcacggctttattgatacagttggatttgatttgtacagtcaaatgttagaagaagctgtaaatgaaaaacgtggtattaaggaaccagaatctgaggtgccagaagtcgaagttgatttaaacttggatgcatatttgccaacagaatatattgcaaatgaacaagctaaaattgaaatttataaaaagctacgaaaaactgaaacatttgatcaaattatcgacattaaagatgaattaattgatcgtttcaatgattatcctgttgaagtagcacgtttgcttgatatagtggaaataaaagtacacgcattacattcaggtatcacgttgattaaagataaagggaaaataattgatattcatttatctgtaaaagccactgaaaatattgatggcgaagtgctgttcaaagcaacacaacctttaggtagaacaatgaaggttggtgttcaaaataatgcaatgacaattactttaacgaaacaaaatcaatggcttgatagtttgaagtttttagttaagtgcattgaagaaagtatgagaatcagtgatgaagcataaagaagcatttaatggcgttgtcgtgttaactgctgcattaattgtcattaaaattctgagtgctgtatatcgaattccatatcaaaatatattaggcgatacaggtttgtatgcatatcaacaagtgtatccaattgtagcattaggaatgatattatcgatgaatgccattcctagtgcaattacacaaaatatagggaagtatcatagtgacgaagcatatgcaaaagcagtcgcttatatacaattagttggtatattattatttattgctatttttgtgtttgcgaacaatattgcacatatgatgggtgatggccatttaacaccaatgattcaagctgcaagtttaagctttatatttataggtatgcttggcgtgttaagaggttattatcaatctgcaaataatatgacagttccggctatttcccaggttatagaacaagttatacgagtaggtattatcattgttactattgttatttttgtagacagaggttggacgatatatgaagcgggaacaattgctattttagcatcaacgataggttttttaggttcttcaatttatttagtagcgcaccgaccttttaagtttaaaatggtaaataacactgcaaagatcgtttggaaacagttcgcactttcggttttgattttcgctatcagtcaattaatcgtaattttatggcaagtgattgatagtgttactattattaagtcacttcaagcgatacgcgtgccattcgatgttgccataactgaaaaaggagtctatgaccgtggtgcatcatttattcagatgggattgattgtaactacaacatttagttttgcgctcattcctctgttaagtgacgcaattaaaatgaataatcaggtacttatgaatcgttatgcaaatgcgtcattaaagattacgattttaataagtacagcagcaggaataggattaattaatttattgcctttaatgaacggtgtgttttttaagacgaatgatttaaccttaacgttaagtgtttatatgattacggtcatttgtgtatcgttaattatgatggatatggcattattacaagcgcaacatgctgtgagacctatttttgttggtatgacggcaggattggttattaaatttatacttaatatcattttgattcgtttaagtggcattattggtgcgagcattagtactgttgtatcattaattatattcggtacgattatccatattgctgtcacgagaaaataccacttatatgcgatgagacgattttttatcaatgttgttttaggtatggtatttatgtcgattgttgttcaatgcgtgttaaacatagtgacaacacacggtagaatcactggactcattgaattattatgtgcagcagtattaggtatcattgcattgtttttctatatttttagatttaatgttttgacatataaagagttaacttatttaccatttggttcaaagttgtatcaaattaagaaaggaagacgttgatggcacataccattacgattgttggcttaggaaactatggcattgatgatttgccgctagggatatataaatttttaaagacacaagataaagtttatgcaagaacgttagatcatccagttatagaatcattgcaagatgaattaacatttcagagttttgaccatgtttatgaagcacataaccaatttgaagatgtctatattgatattgtggcgcaattggttgaagctgctaatgaaaaagatattgtctatgcggttccgggtcatcctagagttgctgagacaactacagtgaaattactggctttagcaaaggacaatactgatatagatgtgaaagttttaggtgggaaaagctttattgatgatgtgtttgaagcagttaatgtagatccaaatgatggcttcacactgttagatgcgacatcattacaagaagtaacacttaatgttagaacgcatacattgattacgcaagtttatagtgcaatggttgctgctaatttgaaaatcactttaatggaacgatatcctgatgattaccctgttcaaattgtcactggtgcacgaagcgatggtgcggataacgttgtgacatgcccattatatgaattggatcatgatgaaaatgcattcaataatttgacgagtgtattcgtaccaaaaatcataacatcgacatatttgtatcatgactttgattttgcaacggaagtgattgatactttagttgatgaagataaaggttgtccatgggataaagtgcaaacgcatgaaacgctaaagcgttatttacttgaagaaacatttgaattgttcgaagctattgacaatgaagatgattggcatatgattgaagaactaggagatattttattacaagtgttattgcatactagtattggtaaaaaagaagggtatatcgacattaaagaagtgattacaagtcttaatgctaaaatgattcgtagacacccacacatatttggtgatgccaatgctgaaactatcgatgacttaaaagaaatttggtctaaggcgaaagatgctgaaggtaaacagccaagagttatatttgaaaaagtatttgcagagcattttttaaatttatatgagaagacgaaggataagtcatttgatgaggccgcgttaaagcagtggctagaaaaaggggagagtaatacatgagattagataaatatttaaaagtatcacggttaataaagcgacgtacgctagcaaaagaagtaagtgatcaaggtagaattacaataaatggtaatgttgctaaagctggatcggatgttaaagttgaagatgtgctgacgattcgctttggtcaaaaattagtaacagttaaagtaactgcattaaatgaacatgcatctaaagataacgcgaagggtatgtatgaaatcattgaagagcgtcgacttgaagaagcgtaaattggaggtgacaagcaatgaaaaataaagtagaacatatagaaaatcagtacacgtcgcaagagaacaagaaaaaacaacgtcaaaaaatgaaaatgcgtgttgttcgtaggcgtattacagtatttgcgggcgtattacttgcgataattgttgttttatcaatcttgcttgttgtccaaaaacatcgcaatgatattgatgcacaggagcgaaaagcgaaagaagcacagtttcaaaagcaacaaaatgaagaaattgcgttaaaagaaaagttgaataatctgaatgacaaagattacattgaaaaaattgcgcgtgatgattattacttaagcaacaaaggtgaagtgatttttaggttgccagaagacaaagattcgtctagctcaaaatcttcgaaaaaataaatccaaattgattcaaaattatccgagtatagacattgtgaaaaaatccaaacaaggatataataagggaaaatcgaatcaaatcgggaggatttatttaacatatgtcaatcgaagttggaaataagcttaaaggtaaagtcactggtattaaaaagtttggtgcattcgtagaattacctgaaggaaaaagtggtttagttcacattagtgaagtcgcagataattatgttgaaaacgtagaagagcacctttctgttggtgatgaagtagacgtaaaagtattatctattgctgatgatggaaaaattagtctttcaattaagaaagctaaagaccgtccacgtagacaacatacgagtaaaccaagtcatcaaaaaccagtgcaaaaagccgaagattttgaaaagaaattaagcaatttcttaaaagatagtgaagataaattaacttcaatcaaacgtcaaacagaatctagacgcggtggcaaaggttcaagacgttaattaaaataaataaagactgcttcgataaggaatatatttagaatgatgcgtatcgaataatcgattgcagcgttagacaatctaagactgtttcttaaataaggagcagtctcttttatttgtaatgatataactaagacttataccatttttgaaaattgtaaaagtgaggtgatgttatgcagttaaatagtaatggttggcatgttgatgaccatattgttgtcgctgtttctacaggtattgatagtatgtgtttattgtatcaactactaaatgattataaagatagttatagaaaactaacatgcttacatgtcaatcatggcgttaggtcagcttcaattgaggaagccagatttttagaagcatactgcgaacgtcatcacatcgatttacatatcaaaaagttagatttgtcgcatagtctcgaccgaaataacagcattcagaatgaagctcgaattaaacgttacgaatggtttgatgaaatgatgaatgtattagaagcggatgtattgctaacggcgcatcatttggacgatcaattagaaactattatgtatcgtatttttaatgggaaatcaacacgtaataaactaggatttgatgagttatcgaagcgaaaaggttatcagatttatcgaccacttttagctgtctctaaaaaagaaataaaacaattccaagagagatatcatattccatattttgaagatgaatctaataaagataacaaatatgttagaaatgatattcgtaatagaattattccagctattgatgaaaataatcaacttaaagtatcgcatttattaaaattaaaacaatggcatgatgaacaatatgatattttgcaatattcagctaaacaatttattcaagaatttgtgaagtttgatgaacagtcaaaatatttagaggtttctagacaagcttttaataacttaccaaactcattaaagatggttgtgttggactgcctattatcaaagtattatgagttgtttaatattagtgctaaaacatacgaagagtggtttaaacaatttagtagtaagaaagcacaattcagtattaatctcacggataaatggataattcaaatcgcatatggtaaattaataataatggctaaaaataatggcgatacatattttagagttcaaacaattaaaaagccaggtaattatatttttaacaaatatcgattagagatacattctaatttaccaaaatgtttatttccgcttacagtgagaacacgacaaagtggcgatacatttaaactgaatgggcgcgatggttataagaaagtgaatcgcctgtttatagattgtaaagtgccacagtgggttcgggatcaaatgccaatcgtattggataaacaacagcgcattattgcggtaggagatttatatcaacaacaaacaataaaaaaatggattataattagtaaaaatggagatgaatagcgttatgcataatgatttgaaagaagtattgttaactgaagaagatattcaaaatatctgtaaggaattgggagcacaattaacaaaggattatcaaggtaaaccattagtatgcgtgggtatcttaaaaggctcagcaatgtttatgtcagatttaattaaacgaattgatacccatttatcaattgatttcatggatgtttctagttatcacggaggcactgagtcaactggtgaagttcaaatcattaaagatttaggttcttctattgaaaataaagacgtattaattattgaagatatcttagagactggtactacacttaagtcaattactgaattattacaatctagaaaagttaattcattagaaatagttactttattagataaaccaaaccgtcgtaaagcggacattgaagctaagtatgtaggtaaaaaaataccagatgaatttgttgttggttacggtttagattatcgtgaattataccgaaacttaccatatatcggtacgttaaaacctgaagtgtattcaaattaattttttaatcaatttcagttattattactatgcgtttgagaaataatagtgtagactcaaaaatatgaaaaatgtatttcatatatatttaattttagacaagacatatgtcttgaaaagttgaaaaatatagagattgataaaactaatacgggtgtgaatgacattgatgttaagctcaattactagcttataaaacatgtcatatgttacaatttttgttagttttattatgggaagtaggaggaaatgacgcatgcagaaagcttttcgcaatgtgctagttatcgtaataataggcgttattatttttggtctattttcatatttaaacggtaatggaaatatgccgaaacagcttacatataatcaatttactgagaagttggaaaaaggtgaccttaaaactttagaaatccaaccacaacaaaatgtctatatggtaagtggtaaaacgaaaaatgatgaagactattcatcaactattttatataacaacgaaaaagaattacaaaaaattactgatgctgctaaaaagcaaaacggtgtaaaattaacgattaaagaagaagaaaaacaaagtgtctttgtgagtatactttcaacattaattccagttgtagtcatagcgttattatttattttcttcctaagccaagcacaaggtggcggtagtggcggtcgtatgatgaactttggtaaatctaaagcaaaaatgtacgataataataaacgtcgtgttcgtttctctgatgtagcaggggcagatgaagaaaaacaagaattaattgaaattgttgatttcttgaaagataataaaaaattcaaagaaatgggatctaggattcctaaaggtgtcttacttgttggacctccaggtactggtaaaacattacttgctagagcggttgcaggtgaagctggcgcaccattcttctctattagtggttcagactttgtagagatgtttgttggtgttggtgcgagccgtgttcgtgacttattcgataatgctaagaaaaacgcgccttgtatcatctttatcgatgagattgatgctgttggtcgtcaacgtggtgcaggtgttggtggcggtcatgatgaacgtgaacaaaccctaaaccaattattagttgaaatggatggtttcggtgaaaatgaaggtatcattatgatagctgctacaaaccgtcctgatatccttgacccagccttattacgtccaggtcgttttgatagacaaattcaagttggtcgtccagatgtgaaaggccgtgaagcaattcttcatgttcatgctaaaaacaaaccacttgatgaaacggttgatttaaaagcaatttcacaacgtacacctggtttctcaggtgctgatttagagaacttattaaatgaagcatctttaattgctgtacgtgaaggtaaaaagaaaattgacatgagagatatcgaagaggcaacggatagagttatagccggacctgctaagaaatctcgagttatttctaagaaagaacgtaatattgttgctcatcacgaagctggtcatacaattatcggtatggtacttgatgaggcagaagtagtgcataaagttactattgttccacgtggacaagcaggtggttatgcaatgatgctacctaaacaagatcgtttcttaatgactgaacaagagttattagataaaatctgtggtttacttggtggacgtgtatcagaagatattaactttaacgaagtatcaacaggtgcttcaaatgacttcgaacgtgcaacacaaatcgcacgctcaatggttacgcaatatggtatgagtaaaaaattaggaccattacagttcggtcatagcaatggtcaagtattcttaggtaaagatatgcaaggtgagcctaattattcaagccaaatcgcatatgaaattgataaagaagttcaacgaatcgttaaagaacaatacgaacgttgtaaacaaattttattagagcacaaagaacaattaattttaattgctgaaacattattaacagaagaaacattagttgctgaacaaattcaatcattattctacgaaggtaaattacctgaaattgattatgatgcagctaaagttgttaaagatgaagattctgaatttaatgatggtaaattcggtaaatcttatgaagagattcgtaaagagcaattagaagatggacaacgtgacgaaagtgaagatcgtaaagaagaaaaagatattgctgaggataaaaaagaagctgataaatctgatgaaaaagatgaaccagcacatcaacaagccccaaatatcgaaaaaccttacgatccaaatcacccagacaataaataatcgattatattcagtacctctttctatgataaagttatagaaagaggtacttttatcgtttttgaaaatacgtattagattttaagtcgttgaattgttatagcagaaaataattgtaaaacaagttacttcattatttagaatgatgggtgtagaataagtacaattgttgcattttatgaagtaaagtaattttttaaatatagagtaatagaggagattgaaataatgacacacgattatattgttaaagcattagcatttgatggagagattagggcttatgctgctttgacaactgaaactgttcaagaagcacaaacgagacattatacatggccgacagcatctgctgcaatgggaagaacaatgacagcaacagctatgatgggcgcaatgttgaaaggtgatcaaaaattaactgtcactgtagatggccaaggacctattggacgaattattgccgatgcaaatgctaaaggcgaggtgcgtgcttatgtagaccatccacaaactcattttccattaaatgagcaaggtaaacttgatgtaagacgagcggtagggacaaatggatctattatggttgttaaagacgttggaatgaaagactatttctctggagcaagtccaattgtttcaggagaacttggtgaagattttacttattattatgctacaagtgaacaaacaccttcatcggtaggtcttggtgtattggtaaatcctgataatacgattaaagcagcaggaggatttatcattcaagttatgccaggtgccaaagatgaaacaatttcaaaattagaaaaagcaattagtgaaatgacaccagtttctaaattaattgaacaaggattaacgccagaaggattactaaacgaaatcttaggtgaagaccatgtgcaaattttagagaaaatgcctgttcaatttgaatgtaattgtagtcatgagaaatttttaaatgctattaaaggattgggcgaggctgagattcaaaatatgattaaagaagatcatggtgctgaagcagtatgtcatttctgtggaaataaatataaatatactgaagaagaattaaacgtgttgctagaaagtttagcgtaatttaatttaaatcaatacgctaaaatgtttatttttagcggtttagtgaaatgtagaactaaatagttgtataatccttagtgattttgtttgctttctagaatttatttgataaaataattctatatccgataaataaactaagatttcaacaactaactaaaaaggagtgttcttaatggcacaaaaaccagtagataatattactcaaattattggcggtacaccggtagtcaaattgagaaatgtagtagatgacaatgcagcagatgtttatgtaaaattggaatatcaaaatccaggtggttctgtaaaggatagaattgctttagcaatgattgaaaaagcagagcgagaaggcaaaattaaacctggcgatacaattgtagaaccaacaagtggtaatacaggtatcggtttagcatttgtatgtgctgctaaaggatataaagcagtatttactatgcccgaaacaatgagccaagagcgtcgtaatttattaaaagcatacggtgcggaattagttttaacgcctggatcagaagcgatgaaaggtgcaattaaaaaagctaaagaattgaaagaagaacatggttacttcgagccacaacaatttgaaaaccctgcgaaccctgaagttcatgagttaactacaggtcctgagttattacaacaatttgaagggaaaactatcgatgcgttcctagctggtgttggtactggtggtacgttatctggtgtaggtaaagttctgaaaaaagaatatcctaacatcgaaattgttgctatagagcctgaggcttctccagtattgagcggtggtgagccaggtccacataaattacaaggtttaggtgctggatttattccaggcactttgaatacagaaatctatgacagtattattaaagtaggaaatgatacagcgatggaaatgtctcgtcgagttgctaaagaggaaggtattttagcaggtatttcatcaggtgctgcgatttatgctgccattcaaaaagcaaaagaattaggaaaaggtaaaacagtagtaacagtattgccgagtaatggtgaacgctacttatcaacacctttatattcattcgatgactaattaatgtcatttaaaagagtgagttatctttttgagataacttgctctttttttctaccatgtatatttttaaaaatatgagcgttaaattaaacatttttctgataaaaatatccagtgaatgataagataataaacgtacatactaataactagtaaatagcaggagtaaattttattagagttaaacaatacataattaaagggtggttaacatgactaaaacaaaaattatgggcatattaaacgtcacacctgattcattctcagatggtggaaaatttaataatgttgaatcagctataaatagagtgaaagccatgatagatgaaggtgctgacattatagatgttggaggtgtttcaacgagacccggtcatgaaatggtttcattagaagaagagatgaacagagtattacctgttgttgaagctattgtcggttttgatgtaaaaatttcagtcgatacatttcgaagtgaggttgctgaagcatgtttaaaattaggcgttgatatgattaatgatcaatgggcgggtctgtatgatcatcgtatgttccaaattgtagctaaatatgacgcggaaattattttaatgcataatggaaatggtaatcgtgatgaaccggttgtcgaagaaatgttaacatctttgttagcacaagcacatcaagctaaaatagctggtataccttcaaataaaatttggctagatccaggtataggtttcgctaaaactagaaatgaagaagccgaagttatggcaagactggatgaacttgttgcaacagaatatccagttttattagcgacaagccggaaacgtttcactaaagagatgatgggttatgatacaacaccggttgaaagagatgaagtaactgcagctacgactgcatatggtattatgaaaggcgttagagcagtacgcgttcataatgtcgagttgaatgctaaattagctaaaggtatagattttttaaaggagaatgaaaatgcaagacacaatctttcttaaaggtatgcgcttttatggatatcatggtgctttatcagctgaaaatgaaatagggcaaattttcaaagtggatgtaactttgaaagtagacttagctgaagctgggcgtactgataatgttattgatacagttcattatggtgaagtgttcgaagaggttaaatcaattatggaaggtaaggccgttaatttacttgagcatctagctgaacgtattgcaaatcgtataaattcacaatataatcgtgtaatggaaacgaaagtgagaatcactaaagaaaacccaccgattccgggtcattatgatggagtaggtatcgaaatagtgagggagaataaatgattcaagcatacttaggattaggtagtaatattggtgatagagaaagccagttaaacgatgctataaagattttgaatgaatatgatggtattaacgtatctaatatttctccgatttatgaaacagcaccagttgggtatactgagcaacctaactttttaaatttgtgtgttgaaattcaaacaacactcacagtattacaactgttggaatgttgtttgaagacagaagaatgtttacaccgtattagaaaggaacgatggggtcctagaactttagatgtggatattttgttgtatggagaagaaatgatagatttaccaaaactgtcggtgccacatccgagaatgaatgaacgtgcatttgttttaatcccattaaatgatatagcagcaaatgtcgtagaaccacgttcgaaattgaaagtgaaagatttagtttttgtcgatgacagtgtaaagagatataaataatgtattgttgagaacattcatatttattgggaatagattattgattattggagatgtttccgcattttgattatctctaaatgcatttgatttcgaattagtatatgatgatttagtatgtgttagaattaagttatttcataaaatcaaagtaagcaatatttgataaattgctgtaatttatttaggcttttgttgaagtttgtggaagataatttttatacatttacttagggttgtattaatgataatcgtattttaaatgaataagtaattcataaacgaaaacagaaattgctttattacatttacaagctcttgtaaaattaaaaaagtgataaaattgatgttatgaatataagaaaacatgccacatcataactttaaggtgtaatggttaatgataaagtattagaaacatcgaaagagatgtatgttgagcaaaaatgtctgatattttataaaactttaaaggaaaatgtttgagtgtaccagttggaatactaaaggattacaacaagttaaaggagagaaagttatgtcagaagaaatgaatgaccaaatgttggttcgacgtcaaaaattacaagaattatatgatcttggtatagacccgtttggttctaaatttgaccgttcaggtttatctagtgatttgaaagaagagtgggaccagtattctaaagaagaattggtagaaaaagaagcggatagtcatgtcgctatagctggacgattaatgactaagcgtggtaaaggtaaagcaggatttgcacacgttcaggacttagctggacaaattcaaatttacgttcgtaaagatcaagttggcgatgacgaatttgatttatggaaaaatgctgatttaggcgatatcgttggtgttgaaggtgtaatgttcaaaacaaatactggcgaattatcggttaaagcgaagaaattcacgctactaactaaatcattgcgaccattaccggataaattccacggtttacaggatattgaacagagatatcgtcaaagatatttagatttaattacgaacgaagatagcactcgtacatttattaatcgtagtaaaatcattcaagaaatgcgtaattatttaaataataaaggtttcttggaagtagaaacacctatgatgcaccaaattgctggtggagcagctgctagaccatttgtaacacatcataatgcattagatgcaacgttatacatgcgtattgctattgagttgcatttaaaacgtttaattgtcggtggacttgaaaaagtatatgaaattggtagagtattccgtaatgaaggtgtatcaactagacataaccctgaattcacaatgattgaattatatgaagcatatgcagattatcatgacattatggatttaacagaatctatggtgagacatattgccaatgaagtgttaggttctgcaaaagtacaatacaatggggaaacgatcgatttagaatctgcttggactcgtttgcatattgttgatgctgtaaaagaagctactggtgtagatttttatgaagttaaaagtgatgaagaagctaaagctttagctaaagaacatggtattgaaattaaagatacaatgaaatatggtcatattttaaatgaattctttgagcaaaaagttgaagaaacacttattcagccaacgtttatctatggtcatccgactgaaatttcacctttagcgaagaaaaatcctgaagatcctagatttactgatcgtttcgaattgttcattgtaggtagagagcatgcaaatgcatttactgaattaaatgatcctattgatcaaaaaggtcgttttgaagcgcaacttgttgaaaaagcgcaaggtaatgatgaagcgcatgaaatggatgaagattacattgaagcgttagaatatggtatgcctccgacaggtggtcttggtatcggtattgacagattggttatgttattaactgactctccatcaatcagagacgtattattattcccttatatgagacaaaaataaatgacgttgattgttagtaagagctctcgtgtatacaacatgtgtatgcgagggctttcttaattatggtaattagttcgtgtttgaatgtttttgatagtaatagttaacgatagtggtgctatttttgactgttaaacaaggtagttggctgatagatgaaaatgacgatacgtatatagagtagttcggatgagaaatgttaacgatagacattgagatatcttataacaaaaattgctatattagtataatttatcttaatcagctataaaagtactttaaaattgtatagaatgtgtatggttttgtacatatgtgtatgatagaatactaaaagtgttatgaattagagggcacgagaaatgtcagttttgaagaataaaaaagttgattaaaagtgttgactttatcaattgaatgaagtaatatataaaagtcgccaaaaacagacgaaacacactaaaagctgatgtgacaaagtttacatcaaagtgtaaaattaactattgcaccttattaattaagcgtgtatcatgaataagtaagttattttgtctggtgactatagcaaggaggtcacacctgttcccatgccgaacacagaagttaagctccttagcgtcgatggtagtcgaacttacgttccgccagagtagaacgttgccaggcaaatgacaaatcggagaattagctcagctgggagagcatctgccttacaagcagagggtcggcggttcgaacccgtcattctccaccatttattcttagatatagccggcctagctcaattggtagagcaactgacttgtaatcagtaggttgggggttcaagtcctctggccggcaccatcttttgagccattagctcagctggtagagcatctgacttttaatcagagggtcagaggttcgaatcctctatggctcattacgatttaatttttatatttagcaaaataatgcagaagtagttcagcggtagaatacaaccttgccaaggttggggtcgcgggttcgaatcccgtcttctgctccattattttgccggggtggcggaactggcagacgcacaggacttaaaatcctgcggtgagagatcaccgtaccggttcgattccggtcctcggcaccattttagcgcccgtagctcaattggatagagcgtttgactacggatcaagaggttatgggttcgactcctatcgggcgcgccatttttaaattaattgaataacgggaagtagctcagcttggtagagcacttggtttgggaccaaggggtcgcaggttcgaatcctgtcttcccgattacttcttaaattccattttatgggggcttagctcagctgggagagcgcctgctttgcacgcaggaggtcagcggttcgatcccgctagtctccaccatttattttttacacgatgaacattgaaaactgaatgacaatatgtcaacgttaattccaaaaaacgtaactataagttacaaacattatttagtatttatgagctaatcaaacatcataatttttatggagagtttgatcctggctcaggatgaacgctggcggcgtgcctaatacatgcaagtcgagcgaacggacgagaagcttgcttctctgatgttagcggcggacgggtgagtaacacgtggataacctacctataagactgggataacttcgggaaaccggagctaataccggataatattttgaaccgcatggttcaaaagtgaaagacggtcttgctgtcacttatagatggatccgcgctgcattagctagttggtaaggtaacggcttaccaaggcaacgatgcatagccgacctgagagggtgatcggccacactggaactgagacacggtccagactcctacgggaggcagcagtagggaatcttccgcaatgggcgaaagcctgacggagcaacgccgcgtgagtgatgaaggtcttcggatcgtaaaactctgttattagggaagaacatatgtgtaagtaactgtgcacatcttgacggtacctaatcagaaagccacggctaactacgtgccagcagccgcggtaatacgtaggtggcaagcgttatccggaattattgggcgtaaagcgcgcgtaggcggttttttaagtctgatgtgaaagcccacggctcaaccgtggagggtcattggaaactggaaaacttgagtgcagaagaggaaagtggaattccatgtgtagcggtgaaatgcgcagagatatggaggaacaccagtggcgaaggcgactttctggtctgtaactgacgctgatgtgcgaaagcgtggggatcaaacaggattagataccctggtagtccacgccgtaaacgatgagtgctaagtgttagggggtttccgccccttagtgctgcagctaacgcattaagcactccgcctggggagtacgaccgcaaggttgaaactcaaaggaattgacggggacccgcacaagcggtggagcatgtggtttaattcgaagcaacgcgaagaaccttaccaaatcttgacatcctttgacaactctagagatagagccttccccttcgggggacaaagtgacaggtggtgcatggttgtcgtcagctcgtgtcgtgagatgttgggttaagtcccgcaacgagcgcaacccttaagcttagttgccatcattaagttgggcactctaagttgactgccggtgacaaaccggaggaaggtggggatgacgtcaaatcatcatgccccttatgatttgggctacacacgtgctacaatggacaatacaaagggcagcgaaaccgcgaggtcaagcaaatcccataaagttgttctcagttcggattgtagtctgcaactcgactacatgaagctggaatcgctagtaatcgtagatcagcatgctacggtgaatacgttcccgggtcttgtacacaccgcccgtcacaccacgagagtttgtaacacccgaagccggtggagtaaccttttaggagctagccgtcgaaggtgggacaaatgattggggtgaagtcgtaacaaggtagccgtatcggaaggtgcggctggatcacctcctttctaaggatatattcggaacatcttcttcagaagatgcggaataacgtgacatattgtattcagttttgaatgtttatttaacattcaaaaaaatgggcctatagctcagctggttagagcgcacgcctgataagcgtgaggtcggtggttcgagtccacttaggcccaccattatttgtacattgaaaactagataagtaagtaaaatatagattttaccaagcaaaaccgagtgaataaagagttttaaataagcttgaattcataagaaataatcgctagtgttcgaaagaacactcacaagattaataacgcgtttcctgtaggatggaaacatagattaagttattaagggcgcacggtggatgccttggcactagaagccgatgaaggacgttactaacgacgatatgctttggggagctgtaagtaagctttgatccagagatttccgaatggggaaacccagcatgagttatgtcatgttatcgatatgtgaatacatagcatatcagaaggcacacccggagaactgaaacatcttagtacccggaggaagagaaagaaaattcgattcccttagtagcggcgagcgaaacgggaagagcccaaaccaacaagcttgcttgttggggttgtaggacactctatacggagttacaaaggacgacattagacgaatcatctggaaagatgaatcaaagaaggtaataatcctgtagtcgaaaatgttgtctctcttgagtggatcctgagtacgacggagcacgtgaaattccgtcggaatctgggaggaccatctcctaaggctaaatactctctagtgaccgatagtgaaccagtaccgtgagggaaaggtgaaaagcaccccggaaggggagtgaaatagaacctgaaaccgtgtgcttacaagtagtcagagcccgttaatgggtgatggcgtgccttttgtagaatgaaccggcgagttacgatttgatgcaaggttaagcagtaaatgtggagccgtagcgaaagcgagtctgaatagggcgtttagtatttggtcgtagacccgaaaccaggtgatctacccttggtcaggttgaagttcaggtaacactgaatggaggaccgaaccgacttacgttgaaaagtgagcggatgaactgagggtagcggagaaattccaatcgaacctggagatagctggttctctccgaaatagctttagggctagcctcaagtgatgattattggaggtagagcactgtttggacgaggggcccctctcgggttaccgaattcagacaaactccgaatgccaattaatttaacttgggagtcagaacatgggtgataaggtccgtgttcgaaagggaaacagcccagaccaccagctaaggtcccaaaatatatgttaagtggaaaaggatgtggcgttgcccagacaactaggatgttggcttagaagcagccatcatttaaagagtgcgtaatagctcactagtcgagtgacactgcgccgaaaatgtaccggggctaaacatattaccgaagctgtggattgtcctttggacaatggtaggagagcgttctaagggcgttgaagcatgatcgtaaggacatgtggagcgcttagaagtgagaatgccggtgtgagtagcgaaagacgggtgagaatcccgtccaccgattgactaaggtttccagaggaaggctcgtccgctctgggttagtcgggtcctaagctgaggccgacaggcgtaggcgatggataacaggttgatattcctgtaccacctataatcgttttaatcgatggggggacgcagtaggataggcgaagcgtgcgattggattgcacgtctaagcagtaaggctgagtattaggcaaatccggtactcgttaaggctgagctgtgatggggagaagacattgtgtcttcgagtcgttgatttcacactgccgagaaaagcctctagatagaaaataggtgcccgtaccgcaaaccgacacaggtagtcaagatgagaattctaaggtgagcgagcgaactctcgttaaggaactcggcaaaatgaccccgtaacttcgggagaaggggtgctctttagggttaacgcccagaagagccgcagtgaataggcccaagcgactgtttatcaaaaacacaggtctctgctaaaccgtaaggtgatgtataggggctgacgcctgcccggtgctggaaggttaagaggagtggttagcttctgcgaagctacgaatcgaagccccagtaaacggcggccgtaactataacggtcctaaggtagcgaaattccttgtcgggtaagttccgacccgcacgaaaggcgtaacgatttgggcactgtctcaacgagagactcggtgaaatcatagtacctgtgaagatgcaggttacccgcgacaggacggaaagaccccgtggagctttactgtagcctgatattgaaattcggcacagcttgtacaggataggtaggagcctttgaaacgtgagcgctagcttacgtggaggcgctggtgggatactaccctagctgtgttggctttctaacccgcaccacttatcgtggtgggagacagtgtcaggcgggcagtttgactggggcggtcgcctcctaaaaggtaacggaggcgctcaaaggttccctcagaatggttggaaatcattcatagagtgtaaaggcataagggagcttgactgcgagacctacaagtcgagcagggtcgaaagacggacttagtgatccggtggttccgcatggaagggccatcgctcaacggataaaagctaccccggggataacaggcttatctcccccaagagttcacatcgacggggaggtttggcacctcgatgtcggctcatcgcatcctggggctgtagtcggtcccaagggttgggctgttcgcccattaaagcggtacgcgagctgggttcagaacgtcgtgagacagttcggtccctatccgtcgtgggcgtaggaaatttgagaggagctgtccttagtacgagaggaccgggatggacatacctctggtgtaccagttgtcgtgccaacggcatagctgggtagctatgtgtggacgggataagtgctgaaagcatctaagcatgaagcccccctcaagatgagatttcccaacttcggttataagatccctcaaagatgatgaggttaataggttcgaggtggaagcatggtgacatgtggagctgacgaatactaatcgatcgaagacttaatcaaaataaatgttttgcgaagcaaaatcacttttacttactatctagttttgaatgtataaattacattcatatgtctggtgactatagcaaggaggtcacacctgttcccatgccgaacacagaagttaagctccttagcgtcgatggtagtcgaacttacgttccgctagagtagaacgttgccaggcaaaaaatggatgcgatgagccgcattgagaccgcaaggtctcttttttttatgtctaaaacgtcaaaataaaaagcaaacacaaagaaaaatggcttggcgaagtgaaaacgtttgaatctgacgaaacgagaaaagaacgcaacgagtttagtagagctaaatgagtaagtgagagccgaaggagaggaaagaagcaagcgattgtcacaagtcaagaaaggttcttagcgaggatggtagccaacttacgttccgctagagtagaactggaaatgataatttaataatgtacactttcgattgtctaagtatgtacaactttaattttgtgtttatataaatttaaaatgatatcatcgaaaacaaaatattgtataaatagagaagagcagtaagacggtatctaattgaaaatgatcttactgctcttttatatactttattgaaatacaaaaaggaaattaattattatacaatagacaagctattgcataagtaacactaacttttatcaaagaagtgttactttataattaatgattttattagagcgtctacatgcggttttaaagcatcatcgtctataccgccaaagcctaatataaatttaggggttttcttatagtcttgatcatcatcaaaattataaacttgtaattttaactttactttgtttgctctatcaagacactcttgtaatgttaatccattttttactgtaattgtaaaatgcatacccgtttcagcaccttgaatatcaagctgctctttgtaaggtttcaatctttttaaaatataggttagttttctacgataaattcgtctcattttatttaaatgcctttcaaaaccaccggaagatataaacgttgcaataaggttttgcatatgaacaggtacagtgttgccttcaatgtgattttgagaatgatattttttcattatagaatagggtaacaccatatatgcaactcgacagctaggaaaaatagactttgaaaatgtactgatataaatcactttttctcctcttgaatatagaccttgaattgctggaatgggtttgccgaaatatctaaactcggaatcataatcatcttctataataaatcgttcttctttttcttgagcccattgtattaattgagttcgtttttttaagtccatcacatatccagttggaaattgatgggaaggcgttatatatactatatttttttgtgatttaataacttcatctacgtttattccattatcttcaacttcaatttgttcatattcaacttgttttttatctaaaatatttttgattggtggataactaggtttttcgataataaatgttgaagtataaagtaaatcgactaattgatttactaattgttcggtagatgagccaattataatttgattaggatcacaaattacgccacgattagtaaataaataaaatgccagttgaaaccgcaaatgtaattctccttgaaaatgtcctctacgtaattgatttaaatgatttgtatcataaagatctttggaatactttctgaaaagttctatagggaaatgtttcgtatctatttcatccaaattaaaagcataatcataagcttcatcactcgcttttggtttatatgaatcatcatcaaaaagagaggggataggttgattgtttaaaattgttaaagattcaatttcggacacaaaatatccagagcgaggtcttgaataaatgtaaccttcgtctaatagaagttgatatgcatgctctacggttgtttggctaatagataaatgtttgcttaattgtcttttagaataaaatttatcgccttctttaaattgaccttcaattatttgtttttttaatttttcataaagttgatggtataaagtgtttttcaattttataactgacctcctaaatttatcttattttgtacctttttaaatatcagtttatacattacaatgtatttaatcaacttgaaaaggggttttatgtataatgagtaaaattattggatcagacagagtcaaaagaggtatggctgaaatgcaaaaaggcggcgttattatggatgtcgttaatgctgagcaagcaagaattgcagaagaagctggcgcggtagcagttatggcattagaacgagtaccttctgatattagagctgctggtggtgttgcacgtatggcaaaccctaaaattgtagaagaagtaatgaatgctgtttctattccagtcatggctaaagcacgtattggtcatatcactgaagcaagagtattagaggcgatgggtgttgactatattgatgaatcagaagtgttaacaccagcagatgaggaatatcacttaagaaaagatcaatttacagtaccatttgtatgtggatgtcgtaatttaggtgaagctgcgcgtagaattggtgaaggtgctgctatgttacgtactaaaggtgaaccaggtacaggtaatattgttgaagctgtaagacatatgagacaagttaattcagaagttagtcgattgactgtaatgaatgatgatgagattatgacttttgcgaaagatatcggtgcgccttatgaaattttaaaacaaattaaagacaatggtcgtttaccggtagttaactttgcagctggtggcgttgcgactcctcaagatgctgctttaatgatggaattaggtgctgacggtgtattcgttggatcaggtatttttaaatcagaagatccagaaaaatttgctaaagcaattgttcaagcaacaacacattaccaagactatgaactaattggaagattagcaagtgaacttggcactgctatgaaaggtttagatatcaatcaattatcattagaagaacgtatgcaagagcgtggttggtaagatatgaaaataggtgtattagcattacaaggtgcagtacgtgaacatattagacatattgaattaagtggtcatgaaggtattgcagttaaaaaagttgaacaattagaagaaatcgagggcttaatattacctggtggcgagtctacaacgttacgtcgattaatgaatttatatggatttaaagaggctttacaaaattcaactttacctatgtttggtacatgcgcaggattaatagttctagcgcaagatatagttggtgaagaaggataccttaacaagttgaatattactgtacaacgaaactcattcggtagacaagttgacagctttgaaacagaattagatattaaaggtatcgctacagatattgaaggtgtctttataagagccccacatattgaaaaagtaggtcaaggcgtagatatcctatgtaaggttaatgagaaaattgtagctgttcagcaaggtaaatatttaggcgtatcattccatcctgaattaacagatgactatagagtaactgattactttattaatcatattgtaaaaaaagcatagcttaatgtatgctaaatcaacgaattattgatatttatagatttgttgagaagaaaatatctccttcaaacttagctttggaggagttattttttatgtcaaaattaaaaatgataaaaaataaagctatacataagaaaaaaacccttcaaagagactgagaatagtcaaaattttgaaggggttaattcgatgttgatgtatttgttaaataaagaatccagcgattgcagctgaaatgaaagatactagtgttgcaccgaataataatttcaaaccaaagcgggcaactgtatctccttttttgtcattaagtgatttaatcgcacctgaaataataccgatagagctaaagttagcaaatgatactaagaatacagatgtaacaccttttgcgtgttcagataaatcactaagtttaccaagtgcttgcattgctacaaattcgttagataatagttttgtcgccataactgaaccggcttgaactgcatcttgccatggcacaccgactaagaatgcaaatggtgcaaagacaaaaccaattaatgtttggaaatcccaagaaatagcgccacctgaaactgtactaaagatattgcttacaattccatttaatagagcgataatggcaatgtatccgattaacattgcgcctacaatgacagctactttaaatccatctaaaatatattctcctagcatttcgaagaatgattgttgtctttcttcagtttcttcaactaataatttgtcatcttcttcattaactttataagggttaataattgaagcgatgatgaaaccaccaaataagtttaagacaacagccgttacaacatatttaggttcaattaaggtaaagtatgcaccgataattgaagcagaaacagtcgacattgctgaagctgttaatgtgtataaacgttgcttaggtatgtatggtaattgttttttaattgaaataaatacttcagattgtcccaaaattgctgcagcaactgcattgtatgattctaaacgtcccataccattaattttagaaattaagaatcctaaaacattaatgattaaaggtaaaatctttgtgtattgaaggataccgataatcgctgaaataaatacgataggtaataatacactgaagaagaatggtggttgcttaggatcgatatattgaataccaccgaatacaaagttaacaccatctgctgcttttaataataagtagttaaaaccgtttgaaataccaccaataaccttgattcccattgtagttttaagcaagataaatgcaaagataagctgaattgcaagtaaaattcctacatatttccagcgaatatttttcctgtctgagctaaatagaaacgcaagtgctaaaaagaagataattccgataatcccaattagaatatgcatatatttctcattcctttagttttttctacaatctatcatacaataaaatggaagggctaacatcataaatttttgaaaatataaaaacaaattaattgaaaaaggtcaaaataggtcatataatatagtcaaagaaggtcaaaaaggggtgatatacatgcacaatatgtctgacatcatagaacaatacatcaaacgtttatttgaagagtcgaatgaagatgtcgttgaaattcagagagcgaatatcgcacagcgttttgattgcgtaccatcacaattaaattatgtaatcaaaacacgattcactaatgaacatggttatgaaatcgaaagtaaacgtggtggtggtggttacatccgaatcactaaaattgaaaataaagatgcaacaggttatattaatcatttgcttcagctgattggaccttctatttctcaacaacaagcttattatattattgatgggcttttagataaaatgttaataaatgaacgtgaagctaaaatgattcaagcagttattgatagagaaacgctatcaatggatatggtttctagagatattattagagcaaatattttaaaacgtttgttaccagttataaattattactaaatgaaatgaggtgttgaagtgctttgtgaaaattgtcaacttaatgaagcggaattaaaagttaaagttacaagtaaaaataaaacagaagaaaaaatggtgtgtcaaacttgtgctgagggacaccatccgtggaatcaagctaatgaacaacctgaatatcaagaacatcaagataatttcgaagaagcatttgttgttaagcaaattttacaacatttagctacgaaacatggaattaattttcaagaagtagcgtttaaagaagaaaaacgttgcccatcatgtcatatgactttgaaagatattgcacatgttggtaaatttgggtgtgctaattgttatgcaacatttaaagatgacatcattgatatcgtccgcagagttcaaggtggacaatttgagcacgttggaaagacaccacattcttcacataaaaagatagctttaaagcgaaaaatcgaagaaaagaatgaatatttgaaaaaacttattgaaatccaagattttgaggaagcagccattgttagagatgaaattaaagcactaaaagctgagagtgaggtgcaacatgatgacgcataatattcatgataatatcagccaatggatgaaaagtaatgaagaaacaccaattgttatgtcttctagaattcggttagcgcgtaatttagaaaatcatgtgcatccactaatgtatgctactgaaaatgatggatttagagttataaatgaggtacaagatgccttgccaaactttgaattaatgcgtcttgatcaaatggatcaacaaagtaaaatgaaaatggttgcaaagcatttgattagtcctgaactaataaaacaaccagcagccgcagtattagtgaatgacgatgaatctttaagtgtcatgataaatgaagaggaccatattcgtattcaagctatgggaactgacacgacattacaggctttatataatcaagcttcatcaattgatgatgaattagatcgaagccttgatataagttatgatgaacaacttggttatttaactacatgtcctaccaatataggtactggtatgagagcaagcgtgatgctacatttgccaggtctatctattatgaaaagaatgacacggattgctcaaaccattaatcgttttggatatacaatcagaggtatttacggtgaaggttcgcaagtttatggacatacttatcaagtatccaaccaacttacacttggtaaatctgagttagaaatcatagaaacattaacagaagttgttaatcaaatcattcatgaagaaaaacaaatacgacaaaagttagacacttataatcaattagaaacacaagaccgtgtttttcgctcgctaggtattttacaaaactgtagaatgataactatggaagaggcttcttatagattaagcgaagttaaacttggtatagatttaaattacattgaattacaaaactttaaatttaatgaattgatggtagctatacagtcaccatttttattagatgaagaagatgacaaatctgtaaaagaaaaacgagcagatatactaagagaacatataaagtaggaggtcattatttatgttatttggtagattaactgagcgtgcacagcgcgtattagcacatgcccaagaagaagcaattcgtttaaatcattcaaatataggaacagaacacctattattggggttaatgaaagaacctgaaggaattgctgcaaaagtattagaaagttttaatatcactgaagataaagtaattgaagaagttgaaaaattaatcggacatggtcaagatcatgttggtacattgcattatacacctagagctaaaaaagtcattgaattatcgatggatgaagctagaaaattacatcacaattttgttggaacggaacatattttattaggcttgattcgtgaaaatgaaggtgttgcagcaagagtttttgcaaatctagatttaaatattactaaagcacgtgcacaagttgtgaaagctttaggaaaccctgaaatgagtaataaaaatgcacaagctagtaagtcaaataatactccaactttagatagtttagctcgtgacttaacagtcattgccaaagacggtacattagatcctgttataggacgtgataaagaaattacacgtgtaattgaagtattaagtagacgtacgaaaaacaatcctgtgcttattggagagccaggtgttggtaaaactgctattgctgaaggtttagcgcaagccatagtgaataatgaggtaccagagacattaaaagataagcgtgttatgtctttagatatgggaacagtagttgcaggtactaaatatcgtggtgaatttgaagagcgtctgaaaaaggttatggaagaaatccaacaagcaggtaatgtcatcctatttattgatgagttgcatactttagttggtgctggtggtgctgaaggtgctatcgatgcttcgaatattttgaagccggcattagcacgtggtgaattacaatgtattggtgctactacattagatgaatatcgcaaaaatattgaaaaagacgcggctttagaacgtcgtttccaacctgtacaagttgatgaaccttcagtagtagatacagttgctattttaaaaggattaagagatcgttacgaagcacaccatcgtattaatatttcagacgaagctattgaagcagctgttaaattaagtaacagatacgtttcagatcgtttcttaccagataaagcaattgatttaattgatgaagcaagttctaaagtaagacttaagagtcatacgacacctaataatttaaaagaaattgaacaagaaattgaaaaagttaaaaatgaaaaagatgccgcagtacatgctcaagagtttgaaaatgctgctaacctgcgtgataaacaaacaaaacttgaaaagcaatatgaagaagctaaaaatgaatggaagaatgcacaaaatggcatgtcaacttcattgtcagaagaagatattgctgaagttattgcaggatggacaggtatcccattaactaaaatcaatgaaacagaatctgaaaaacttcttagtctagaagatacattacatgagagagttattgggcaaaaagatgctgttaattcaatcagtaaagcggttagacgtgcccgtgcagggttaaaagatcctaaacgaccaattggtagctttatcttccttggaccaactggtgttggtaaaactgaattagctagagctttagctgaatcaatgtttggcgatgatgatgcgatgatccgtgtagacatgagtgaatttatggaaaaacacgcagtgagccgattagttggtgctcctccaggatatgttggtcatgatgatggtggacaattaactgaaaaagttagacgtaaaccatattctgtaattttatttgatgaaattgaaaaagctcatccagatgtatttaatattctattacaagttttagatgatggacatttgacagatacaaaaggacgtacagttgatttcagaaatacaattatcataatgacatcaaacgttggggcacaagaattacaagatcaacgatttgctggattcggtggttcaagtgatggacaagattatgaaacaattcgaaaaacgatgttaaaagaattaaaaaattcattccgtccagaatttttaaaccgtgtagatgatatcattgtattccataaactaacaaaagaagaattaaaagaaattgtaacaatgatggttaataaattaacaaatcgattatctgaacaaaacataaatattattgtaactgataaagcgaaagacaaaatcgcagaagaaggatatgatccagaatatggtgcaagaccattaattagagcgatacaaaaaactatcgaagataatttaagtgaattaatattagatggtaatcaaattgaaggtaagaaagttacagtagatcatgatggtaaagagtttaaatatgacattgctgaacaaacttcagaaactaaaacaccatcgcaagcataattataaaacagtccaaaacaaattaaagttttgggctgtttttttagtagcattgaactatagaaattcgtgaaagtatccatcaacgaaacaatctaataaaacaatcatcaaaggatagttaagaattatatgtaacaagttaatgagcctacagcgatagcataaaggtatgaatttttataaaggttttttgtttgaagatactagcaacttacgtcaaaataaaataggtctatataatattgtgataaatctagagaaaagagtttactaagaaattattaagattttatctttgaaagataccgactatcaacatgatgtaagtttattttataatattcataaaaaataaatctggtaaaacagtttgcgttagtagtcatgttaaaatacaaacaaatgtaactcacatttaatttgtcataatgggaatgtgcgtttaaaatagatttgttcaaaggaaagtggaggtgcaattttggccaagaaaaaagtgatttttgaatgtatggcttgtggttatcaatctcctaaatggatggggaaatgtcctaattgtggcgcttggaatcaaatggaggaaattgttgaaaaagcagccaatcctaaacatggagttaaaaccaaggaattagcaggtaaagtacaaaaattaaatagtattaaacatgaaacaacgccgagagtgttaacagattcagcagaattcaaccgtgtattaggtggaggtattgtgagcggatcgttagtacttattggtggggatccaggtattggtaagtcaacgttacttttacaaatttgtgcatcgttatctcaaaagaaaaaagtactatatattactggagaagaatcgcttagtcagactaaattacgtgcagagcgattagatgaagattcaagtgaattgcaagtattagctgaaacagatcttgaagttatttatcaaacagtaaaagaagaacaacctgatttattagtagtggattcgattcaaacaatatatcatcctgaaatcagctctgcgccaggttctgtttcacaagttcgtgaaagtacacaaagtttaatgaatattgctaaacaaatgaacattgcaacttttatagtgggtcatgtaacgaaagaaggtcaaattgctggcccaagattgctagaacacatggttgatactgtgctttattttgaaggcgatgaacaccacgcatatcgaattttgcgagctgttaaaaaccgttttggttcaacgaatgaaatgggaatcttcgaaatgaagcaaagtggattaaaaggtgtaaataatccatctgaaatgtttttagaagaacgttcaacaaatgttccaggttcaacaattgttgcaaccatggagggaaccagaccacttttaatagaagttcaagcgctggtaactccaacgacttttaacaatccgagacgaatggcaacagggattgatcataatcgattaagtttgttgatggctgttttggaaaagaaagaaaattatctattacaacaacaagatgcttatatcaaagtagctggcggtgtaaagttaacggagccagcagttgatttaagtgtaattgtagcaactgcatctagctttaaagataaagctgtcgacggattagattgctatattggagaagttggtttaacgggtgaggtacgtcgtgtatctcggatagaacaacgcgtgcaagaggctgcaaaactaggtttcaaacgtgtaattattcctaaaaataatataggcggatggacatatcctgaaggtatacaagtaataggtgtaactactgtacatgaagtattgtcatttgctcttcattcataaaacatcaagaaaggaggacattgtgtgaatatcgttaaactaatggttattattatttacttaattattgggagcgcattaggaataattattattcctgaaattgcaaatgatcttggattacaaaactccagctttttaaaaaatcactatgtagatggcattatcggtagtatttttatgttcttaatttttggtgtatttattagacgagttactaacgctataaaaggtttagaacattttattatgcgtagaagtgctgttgaaatactattcgcaacaataggtttaataatcggattacttatttctgttatggtgtcgtttatattagaatcaattggcaactctatttttaatcatttcattcctgtcataattacgatattactatgttatttcggtttccaatttggccttaaaaaacgagatgaaatgttaatgtttttacctgagaatatagcgcgttccatgtcacaacatactaaaagtgctacgccaaaaattatcgacacaagcgcaattattgatggtcgtattttagaagtcattcgttgcggttttatcgatggcaatattttaattccacaaggtgttattaatgaattacaaattgttgcagattcaaatgacagtgttaaacgtgaaaagggtaaaagaggcttagatattttaaatgaattgtatgatttagactatcctacaaaggttatacatccaactaaaacacatagtgatattgatacgatgttattaaaattagcaaaacaatatcatgcaagtattataacgacagatttcaacctaaataaagtttgtcatgtacatggtatcaaagcattaaatgttaatgatttatcagaagcaatcaaacctaatgtacatcaaggtgatcaactgcatattttactgacaaaaatgggtaaggagcctggtcaggcagtaggatatctagatgatggtacgatggtagttgttgataatgctaaaaatcttattggcagtcatgtcaatttagaagtagtcagcttattgcaaacatcttcaggaagaattgtttttgctaaaaaaatcgaagatacagtatcattataaaaactgtagttgacgaaaacaaaatagatattaaaaggtatatgaaatggcgaagtttgtaatttgaagtataactataaataaatgcaaaacatattagttatcaaaaaatacaaatagtgctaatatatcattgaaacaagttcattaagtgttaaattttagatattaataaagttattcttatagcaatcaagacatacaaaattagaatcaattttaacgtatttgaatagttaatttgaagtttaatttcacagtacataatattcatttttaagtcgttgaaatgtttatgtagtgcagtcttgattcttagggatagcttttttaaagtgttgaaaaaacaacagctttctatttaaaatttaagcatattacccagggaattatgttatgattaaacaatgaaattattttaaggtcatgttaaaaagcattgtttcgttttaacaataagacgagttagacatttgttatgacggtcgaagatagcaaatgaacaatttatatgaactaacttgaaaatctgatatttaatttaggagtgaaaaaaatgagcgatcgtataagagtaagatatgcaccaagtccaactgggtatcttcatattggtaatgcaagaacagcattattcaattacttgtatgctaaacattacaacggagattttgtgattcgaattgaagatactgataaaaaacgtaatttagaagatggagaaacatcacaatttgataatcttaaatggttaggattagattgggatgagtctgtagataaagacaatggctacggaccatatcgtcaatctgaacgtcaacatatctaccaaccattaatagatcagttactagcagaagataaagcatataaatgctatatgacagaagaagaattagaagctgaacgtgaagcgcaaatcgctcgtggtgaaatgcctcgctatggtggtcaacatgcgcatttgactgaagaacaacgtcaacaatttgaagcagaaggacgccaaccatcaattcgtttccgagtacctcaaaaccaaacgtattcatttgatgatatggtaaaaggaaatatttcatttgattcaaatggtattggtgactgggttatcgtaaaaaaagatggcattccaacgtacaattttgcagtagctatagatgatcattacatgcaaatttcagatgtaattcgtggtgatgatcatatttcaaacacgcctaaacaaattatgatttatgaagcatttggctgggagccacctcgttttggtcatatgtcattaattgttaatgaagaacgtaaaaagttaagtaaacgtgatgggcaaattttacaatttattgagcaatatcgtgacttaggttatttacctgaagcgttatttaattttattgcgttattaggttggtctcctgaaggtgaagaagaaatcttttctaaagaagaatttatcaaaatctttgatgaaaagcgtttgtcaaaatcaccagcatttttcgataagcaaaaattagcatgggttaataaccaatatatgaaacaaaaagatactgaaacagtattccaattagcattacctcatttaattaaagcaaatttgattcctgaggtgccgtcagaagaggatttatcttggggacgcaaattaattgcgctttatcaaaaagaaatgagttatgccggtgaaattgtacctttatcagaaatgttctttaaagaaatgccagctcttggtgaagaagaacaacaagtgattaatggagagcaagtaccagagttaatgacgcacttattcagtaaattagaagcacttgaaccatttgaagcggctgaaattaaaaagacaattaaagaagttcaaaaagaaacaggaataaaaggcaagcaattatttatgcctattcgtgttgctgtaacaggccaaatgcatggtcctgaattaccaaatacaattgaagtacttggtaaagaaaaagtgctaaaccgtttaaaacaatataagtaatgaaatagacaagatcaaggtagtatatacttgaattttataacgtaaccacatatgataaagttatattaacaaattacaacaatatgaataaagtattttatataaaacgaaggattagtaattaaatttatacgatgcagagagtgtacggttgctgtgagtacaacgtagaaattaatgaatgcaccttcgtaaaatgaattaaatatataatgagagtgatgagcattaagttgacttagtttccttgataatttggaagcgccagcaatattattaatgttattcgctaaattcagagtggaaccgtgcggaagcgcctctaacaatacaacttgtatgttagtggtgcttttttgatatttaatttcgcaggtacttcaattatgtatttacgtagttcaatcattgaggaggaaatgatcttgttaaaaagaatgagagacgatataaaaatggtatttgagcaggatccagcggcacgttcaacattagaagtcattacaacgtatgcaggtttacatgcagtttggagtcatttgattgcacataagttatacaaccaaaaaaaatatgttgcagcacgcgcgatatctcaaatttcaagatttttcacaggtatagaaatccatccaggtgctaaaattggaaagcgtctatttatagatcatggtatgggcgttgtaataggagaaacatgtacaattggtgataatgtgacaatctatcaaggcgtgacacttggtgggacagggaaagaaagagggaaaagacacccagatataggagacaatgttttaatagcagccggtgcgaaagttttaggaaatattaaaataaattcaaatgtaaatattggtgcaaattcagttgttttacaatcagttccaagttattcaacggttgttggtataccaggacatattgttaagcaagatggtgttcgagttggaaaaacatttgatcatcgccatctacctgatccaatttatgaacaaattaagcatttagaacgacaacttgaaaagactaggaatggagagattcaagatgattacattatataatacgcttacacgtcaaaaagaagtgttcaagcctatagaaccagggaaagtaaaaatgtatgtatgtggtcctactgtatataactacattcatattggtaacgcaagaccagcaattaattatgacgtagtgagacgttactttgaataccaaggatataatgtagaatatgtatcaaattttacagacgtagatgataaattaattaaacgttctcaagaattaaatcagtctgttcccgaaattgcagaaaaatatatcgctgcttttcatgaagatgttggtgcgttaaatgttagaaaagcgacttcaaatccaagggtaatggaccatatggatgacattattcaatttattaaagatttggtggatcaaggttatgcatatgaaagtggtggcgatgtttactttagaacacgtaaatttgaaggttatggtaaattaagtcatcaatccatagatgacttaaaagtgggtgctcgtatagatgcaggagagcataaagaagatgcacttgattttacattgtggaaaaaagcgaagcctggcgagattagttgggatagcccatttggtgaaggtagaccaggatggcatatagaatgttctgtaatggcatttcatgagctaggacctacaattgatatacatgcgggtggttcagatttacaatttccacatcatgaaaatgaaatagcacaatcagaagcacataatcatgcgccatttgctaattattggatgcataatggtttcattaatattgataatgaaaaaatgagtaaatcactaggcaactttattttagttcacgatattattaaagaagttgatccagatgtactaagattctttatgattagcgtacattatagaagcccaattaactataatctagaattggtagaatcagcacgtagtggactagagcgtattcgcaatagttatcaattaattgaagagcgcgcacaaattgctactaatattgaaaatcaacagacatatattgatcaaattgatgcgattttaaatcgttttgaaacagttatgaatgatgattttaatacagctaatgcaattacagcttggtatgatttagcaaaacttgcgaataaatatgtactagagaacacaacatcaacagaagtaattgataaatttaaagcagtttatcaaattttcagcgatgttttaggtgtaccgttaaaatctaaaaatgcagatgaattattggatgaagatgttgaaaaattaatcgaagagcgtaatgaagcaaggaaaaacaaagattttgcacgagcagatgaaattcgagacatgctgaaatcacaaaacattatattagaagacacacctcaaggggttagatttaaacgtggataatcaacaagataatcacattaaattattgaatccattgaccttagcatatatgggagacgcagtcttagatcaatatgtacgtacctatatcgttttaaagcttaaaagtaagcctaataaactacatcaaatgtctaaaaaatatgtatctgccaaaagtcaggcgcaaacgttagaatatttaatggagcaagaatggtttacagacgaagaaatggatattttgaagcgagggcgtaacgcgaaaagtcatactaaagctaaaaacactgatgttcaaacatatcgtaaaagttcagcgatagaagcagtgataggttttctttatttagaaaaaagagaagaacgattagaggcattattaaataaaataataacaatagtaaacgaaaggtagtgacgatgtggaagatacggttattgttggtaggcatgctgttagagaagcgattattactgggcatccgataaataagatattgattcaagaaggtattaaaaagcaacaaattaatgaaattttaaaaaatgcaaaagatcaaaaaatcattgttcaaactgtaccaaaatctaaattagattttttagcaaatgcaccacatcagggtgttgcagcgcttattgcaccatatgaatatgctgacttcgatcaatttttaaaacagcaaaaagaaaaagaaggtttattgacagtacttatattagacggcttagaagacccacataacttgggatcaattttaagaacagccgatgcaacgggagttgatggtgttattattcctaaacgtcgttcagttacactaacgcaaacagttgcaaaagcctcaacaggtgcaattgaacatgtaccagttattcgagtgacaaatttagctaaaactatcgatgaactaaaagataatggcttttgggtagctggcactgaagctaataatgcaacagattatagaaatctagaagcggacatgtcattggctattgtaattggtagcgaaggacagggtatgagtcgcctagtaagtgataaatgcgatttttatattaagattccaatggttggacatgtaaacagtttgaatgcttcggttgcagcaagtttaatgatgtacgaagtatttcgaaaaagacatgatgttggagaaatataatgaaagaacgttacttaatcattgatggatacaatatgataggacaatcaccaacgctaagcgccattgcaaaagagaatttagaagaagctagaatgcaattaatagatgcaattgcaaattataatgcagttatttcagatgaaattatttgtgttttcgatgcttatgaccaatcgggtgttgaaagagaatacatgtatcatggcgttaaaacgatttttaccaaggaaaaagaaacagctgatagtttcatagaacgttatgtttatgaactttatgacaagcatactaagcatattacagttgtaacaagtgatatgagtgagcaacatgctatctttggatcaggtgcatatagaatatcatctcgcgaaatgtggagagatttaaaagaaaatgaaattgatgtgagtaaatcattagatgatataagtgaaaacaagccaagaactcgaattccgttatcttctgaaatccttgcagaatttgaaaaaatacgaagaggacatcataagaaatgacatttccgtcatcttgaaattttgaatgtaacaatattaaactaaccttaaattttagatagaaggggttagtttaatatttgaaatacgatttgacaactcaagacagtacaatcaaacgtaacaatgcaataaatgataaagacttcgaaaagttagtaatggatctacaaccattaattattcgacgcatcaaaacatttggatttaatcattatgatttagaagacttatatcaagaaatacttatacggatgtataggtcggtccaaacatttgattttagtggagagcagcctttcacaaattatgttcaatgtttaattacgtctgtaaagtatgattatttgagaaaatatttagctacaaataaaagaatggataatttgattaatgaatatagagttacgtatccatgtgcaataaagcgttttgatgttgaaaacaattatttgaataaattagcaattaaagagttgatttgtcagtttaagtatttgagtgcatttgaaaaagatgtcatgtatttaatgtgtgaacaatataagccgagagaaattgctcaattgatgcatgtaaaagagaaagtgatttataatgccatacaacgatgtaaaaataaaataaaacgttatttcaaaatgatttgaaaagcgccttaggacgtgaattgaattataacgtgttacttactgatggtttgacatttgttataaattttatgtatagtatactggtattataatgaataaaggtgaattattgtgagaaaaatacctttaaattgtgaagcttgtggcaatagaaattataatgttcctaagcaagaaggctcggcaacaagattaaccttaaagaaatattgtccaaaatgtaacgcgcacacaattcataaagaatcgaaataaatacattcgaaataatactttgataatatgttcaaaggatttggaggttgagcagatggctaaaaaagaaagtttctttaaaggcgttaagtctgaaatggaaaaaacaagttggccgacgaaagaagagctatttaaatatactgtaattgtagtttctactgttatattcttcttagtctttttctatgccttagatttaggaattacagcattgaaaaatttattatttcgttagaggagtgaagacatgtctgaagaagttggcgcaaagcgttggtatgcagtgcatacatattctggatatgaaaataaagttaaaaagaatttagaaaaaagagtagaatctatgaatatgactgaacaaatctttagagtagtcataccggaagaagaagaaactcaagtaaaagatggcaaagctaaaacgactgttaaaaaaacattccctggatatgttttagtggaattaatcatgacagatgaatcatggtatgtggtaagaaatacaccaggcgttactggttttgtaggttctgcaggtgcagggtctaagccaaatccattgttaccagaagaagttcgcttcatcttaaaacaaatgggtcttaaagaaaagactatcgatgttgaactcgaagttggcgagcaagttcgtattaaatcaggtccatttgcgaatcaagttggtgaagttcaagaaattgaaacagataagtttaagctaacagtattagtagatatgtttggccgagaaacaccagtagaagttgaattcgatcaaatagaaaagctttaattaacaattaaagttattaaactaaccaaaagataaaaaagagtattgattttttaattagaaaagtgttaaaattatgtggtcgcgcttttagagcgcccatttcgtcacgaaatgttaagagtgggagggcaaaactgagccctgtgaccacatcacgatatcaaggaggtgcacatcgtggctaaaaaagtagataaagttgttaaattacaaattcctgcaggtaaagcgaatccagcaccaccagttggtccagcattaggtcaagcaggtgtgaacatcatgggattctgtaaagagttcaatgcacgtactcaagatcaagcaggtttaattattccggtagaaatcagtgtttatgaagatcgttcatttacatttattacaaaaactccaccggctccagtattacttaaaaaagcagctggtattgaaaaaggttcaggcgaaccaaacaaaactaaagttgctacagtaactaaagatcaagtacgcgaaattgctaacagcaaaatgcaagacttaaacgctgctgacgaagaagcagctatgcgtattatcgaaggtactgcacgtagtatgggtatcgttgtagaataattttacgaatattaaatttgattacatgatttaaacgatgaagcagataacagagataataatgatgaattataaatataatctgaatgactagattaatgattgatttattcataagattaattcttctgttgtctgctcttaacttgcatatagcaagtaatgtgggaggaaattccgctaaaaccactaaaggaggaactataaatggctaaaaaaggtaaaaagtatcaagaagcagctagtaaagttgaccgtactcagcactacagtgttgaagaagcaattaaattagctaaagaaacaagcattgctaactttgacgcttctgttgaagttgcattccgtttaggaattgatacacgtaaaaatgaccaacaaatccgtggtgcagttgtattaccaaacggaactggtaaatcacaaagtgtattagtattcgctaaaggtgacaaaattgctgaagctgaagcagcaggtgctgactatgtaggtgaagcagaatacgttcaaaaaatccaacaaggttggttcgacttcgatgtagtagttgctacaccagacatgatgggtgaagttggtaaattaggtcgtgtattaggaccaaaaggtttaatgccaaaccctaaaactggaactgtaacaatggatgttaaaaaagctgttgaagaaatcaaagctggtaaagtagaatatcgtgctgaaaaagctggtatcgtacatgcatcaattggtaaagtttcatttactgatgaacaattaattgaaaacttcaatactttacaagatgtattagctaaagctaaaccatcatctgctaaaggtacatacttcaaatctgttgctgtaactacaacaatgggtcctggagttaaaattgatactgcaagtttcaaataataaatgatataaacaattacaggctgaaagaaatatctttcagtctgtaaaaatatattgacaataagtaatttccaagttatattacttattgtgattattttacctaagacagtaggagttatttataacttaaaatttatcctgccgaggctaaaattgacttgaacgtgatgatctatgatctttcaagcactttttgccgtgggtagaaagtgctttttttattaattttaaaaaaagcaccaaaaatttaaatggaggtgtctgaatgtctgctatcattgaagctaaaaaacaactagttgatgaaattgctgaggtactatcaaattcagtttcaacagtaatcgttgactaccgtggattaacagtagctgaagttactgacttacgttcacaattacgtgaagctggtgttgagtataaagtatacaaaaacactatggtacgtcgtgcagctgaaaaagctggtatcgaaggcttagatgaattcttaacaggtcctactgctattgcaacttcaagtgaagatgctgtagctgcagcgaaagtaatttctggatttgctaaagatcatgaagcattagaaattaaatcaggcgttatggaaggcaatgttattacagcagaagaagttaaaactgttggttcattaccttcacacgatggtcttgtatctatgcttttatcagtattacaagctcctgtacgcaacttcgcttatgcggttaaagctattggagaacaaaaagaagaaaacgctgaataatttttagcgtaaaaaaattaaaaataatggaggaattataaaatggctaatcatgaacaaatcattgaagcgattaaagaaatgtcagtattagaattaaacgacttagtaaaagcaattgaagaagaatttggtgtaactgcagctgctccagtagcagtagcaggtgcagctggtggcgctgacgctgcagcagaaaaaactgaatttgacgttgagttaacttcagctggttcatctaaaatcaaagttgttaaagctgttaaagaagcaactggtttaggattaaaagatgctaaagaattagtagacggagctcctaaagtaatcaaagaagctttacctaaagaagaagctgaaaaacttaaagaacaattagaagaagttggagctactgtagaattaaaataattcaagtatcttaaacttaataatcaaagttttatagcaagtattgctataatataatgattctttgagaagttaaaaccccgttattttgataacggggttttattcatttaaagactgagtgaaatgttataattataatgacgagttacaaagtgaagatgaggtggaataatgagtcattattacgatgaagatccaagtgtaattagcaatgaacaacgtattcaatatcaattaaaccatcataaaattgatttaataactgataacggagtgttttcgaaagataaagtagattatggttcagatgttcttgttcaaacttttttaaaagcgcatccacctggtccaagtaagcgaattgccgatgttggttgtggttacggaccaattggtttgatgattgctaaagtatcaccacatcattcaattacaatgctagatgttaatcacagagcgctagccttagttgaaaaaaacaaaaaattaaatggtattgataatgtgatcgtaaaggaaagtgatgctttgtctgctgtggaagacaaaagttttgattttattttaaccaatccaccaataagagcagggaaagaaaccgtgcatcgtatattcgagcaagcattacatagattagactcgaacggtgaactattcgttgtaattcagaagaagcaaggtatgccatctgcaaagaaaagaatgaatgaactttttggaaatgtagaagtggtaaataaagataaaggatattacattctgagaagtataaaagcttgaaatgaaatggatattctgttatagttatataatgtaaaaatttatgttcaataagtgtgtacttttacgttaaatagataagttaattaagaataaatatagaatcgaaaatggtgtcatcattagtgttgccgttttctttttgtctttttattaatatgcttatggtatttagctaaaagcggatcacataatttttgaggggtgaatctgtttggcaggtcaagttgtccaatatggaagacatcgtaaacgtagaaactacgcgagaatttcagaagtattagaattaccaaacttaatagaaattcaaactaaatcttacgagtggttcctaagagaaggtttaatcgaaatgtttagagacatttctccaattgaagattttactggtaatttgtcattagagtttgtggattaccgtttaggagaaccaaaatatgatttagaagaatctaaaaaccgtgacgctacttatgctgcacctcttcgtgtaaaagtgcgtctaatcattaaagaaacaggagaagttaaagaacaagaagtctttatgggtgatttcccattaatgactgatacaggtacgttcgttatcaatggtgcagaacgtgtaatcgtatctcaattagttcgttcaccatccgtttatttcaatgaaaaaatcgacaaaaatggtcgtgaaaactatgatgcaacaattattccaaaccgtggtgcatggttagaatatgaaacagatgctaaagatgttgtatacgtacgtattgatagaacacgtaaactaccattaacagtattgttacgtgcattaggtttctcaagcgaccaagaaattgttgaccttttaggtgacaatgaatatttacgtaatactttagagaaagacggcactgaaaacactgaacaagcgttattagaaatctatgaacgtttacgtccaggtgaaccaccaactgttgaaaatgctaaaagtctattgtattcacgtttctttgatccaaaacgctatgacttagcaagcgtgggtcgttataaaacaaacaaaaaattacatttaaaacatcgtttatttaatcaaaaattagctgagccaattgtaaatactgaaactggtgaaattgtagttgaagaaggtacagtgcttgatcgtcgtaaaatcgacgaaatcatggatgtacttgaatcaaatgcaaacagcgaagtgtttgaattgcatggtagcgttatagacgagccagtagaaattcaatcaattaaagtatatgttcctaacgatgatgaaggtcgtacgacaactgtaattggtaatgctttccctgactcagaagttaaatgcattacaccagcagatatcattgcttcaatgagttacttctttaacttattaagcggtattggatatacagatgatattgaccatttaggtaaccgtcgtttacgttctgtaggtgaattactacaaaaccaattccgtatcggtttatcaagaatggaaagagttgtacgtgaaagaatgtcaattcaagatactgagtctatcacacctcaacaattaattaatattcgacctgttattgcatctattaaagaattctttggtagctctcaattatcacaattcatggaccaagcaaacccattagctgagttaacgcataaacgtcgtctatcagcattaggacctggtggtttaacacgtgaacgtgctcaaatggaagtacgtgacgttcactactctcactatggccgtatgtgtccaattgaaacacctgagggaccaaacattggattgattaactcattatcaagttatgcacgtgtaaatgaattcggctttattgaaacaccatatcgtaaagttgatttagatacacatgctatcactgatcaaattgactatttaacagctgacgaagaagatagctatgttgtagcacaagcaaactctaaattagatgaaaatggtcgtttcatggatgatgaagttgtatgtcgtttccgtggtaacaatacagttatggctaaagaaaaaatggattatatggatgtatcgccgaagcaagttgtttcagcagcgacagcatgtattccattcttagaaaatgatgactcaaaccgtgcattgatgggtgcgaacatgcaacgtcaagcagtgcctttgatgaatccagaagcaccatttgttggtacaggtatggaacacgttgcagcacgtgattctggtgcggctattacagctaagcacagaggtcgtgttgaacatgttgaatctaatgaaattcttgttcgtcgtctagttgaagagaacggcgttgagcatgaaggtgaattagatcgctatccattagctaaatttaaacgttcaaactcaggtacatgttacaaccaacgtccaatcgttgcagttggagatgttgttgagtataacgagattttagcagatggaccatctatggaattaggagaaatggcattaggtagaaacgtagtagttggtttcatgacttgggacggttacaactatgaggatgccgttatcatgagtgaaagacttgtgaaagatgacgtgtatacttctattcatattgaagagtatgaatcagaagcacgtgatactaagttaggacctgaagaaatcacaagagatattcctaatgtttctgaaagtgcacttaagaacttagacgatcgtggtatcgtttatattggtgcagaagtaaaagatggagatattttagttggtaaagtaacgcctaaaggtgtaactgagttaactgccgaagaaagattgttacatgcaatctttggtgaaaaagcacgtgaagttagagatacttcattacgtgtacctcacggcgctggcggtatcgttcttgatgtaaaagtattcaatcgtgaagaaggcgacgatacattatcacctggtgtaaaccaattagtacgtgtatatatcgttcaaaaacgtaaaattcatgttggtgataagatgtgtggtcgacatggtaacaaaggtgtcatttctaagattgttcctgaagaagatatgccttacttaccagatggacgtccgatcgatatcatgttaaatcctcttggtgtaccatctcgtatgaacatcggacaagtattagagctacacttaggtatggctgctaaaaatcttggtattcacgttgcatcaccagtatttgacggtgcaaacgatgacgatgtatggtcaacaattgaagaagctggtatggctcgtgatggtaaaactgtactttatgatggacgtacaggtgaaccattcgataaccgtatttcagtaggtgtaatgtacatgttgaaacttgcgcacatggttgatgataaattacatgcgcgttcaacaggaccatattcacttgttacacaacaaccacttggcggtaaagcgcaattcggtggacaacgttttggtgagatggaggtatgggcacttgaagcatatggtgctgcatacacattacaagaaatcttaacttacaaatccgatgatacagtaggacgtgtgaaaacatacgaggctattgttaaaggtgaaaacatctctagaccaagtgttccagaatcattccgagtattgatgaaagaattacaaagtttaggtttagatgtaaaagttatggatgagcaagataatgaaatcgaaatgacagacgttgatgacgatgatgttgtagaacgcaaagtagatttacaacaaaatgatgctcctgaaacacaaaaagaagttactgattaatacgcaatttacaaaacaggcaaaaagatactaagctgaattttattgatgattcagtttagtactttaagccattttaaataaatgcaaatcaatcaaatagcacagctaatctaaattgaaggaggtaggctccttgattgatgtaaataatttccattatatgaaaataggattggcttcacctgaaaaaatccgttcttggtcttttggtgaagttaaaaaacctgaaacaatcaactaccgtacattaaaacctgaaaaagatggtctattctgtgaaagaattttcggacctacaaaagactgggaatgtagttgtggtaaatacaaacgtgttcgctacaaaggcatggtctgtgacagatgtggagttgaagtaactaaatctaaagtacgtcgtgaaagaatgggtcacattgaacttgctgctccagtttctcacatttggtatttcaaaggtataccaagtcgtatgggattattacttgacatgtcaccaagagcattagaagaagttatttactttgcttcttatgttgttgtagatccaggtccaactggtttagaaaagaaaactttattatctgaagctgaattcagagattattatgataaatacccaggtcaattcgttgcaaaaatgggtgcagaaggtattaaagatttacttgaagagattgatcttgacgaagaacttaaattgttacgcgatgagttggaatcagctactggtcaaagacttactcgtgcaattaaacgtttagaagttgttgaatcattccgtaattcaggtaacaaaccttcatggatgattttagatgtacttccaatcatcccaccagaaattcgtccaatggttcaattagatggtggacgatttgcaacaagtgacttaaacgacttataccgtcgtgtaattaatcgaaataatcgtttgaaacgtttattagatttaggtgcacctggtatcatcgttcaaaacgaaaaacgtatgttacaagaagccgttgacgctttaattgataatggtcgtcgtggtcgtccagttactggcccaggtaaccgtccattaaaatctttatctcatatgttaaaaggtaaacaaggtcgtttccgtcaaaacttacttggtaaacgtgttgactattcaggacgttcagttattgcagtaggtccaagcttgaaaatgtaccaatgtggtttaccaaaagaaatggcacttgaactatttaaaccattcgtaatgaaagaattagttcaacgtgaaattgcaactaacattaaaaatgcgaagagtaaaatcgaacgtatggatgatgaagtttgggacgtattggaagaagtaattagagaacatcctgtattacttaaccgtgcaccaacacttcatagacttggtattcaagcatttgaaccaactttagttgaaggtcgtgcgattcgtctacatccacttgtaacaacagcttataacgctgactttgacggtgaccaaatggcggttcacgttcctttatcaaaagaggcacaagctgaagcaagaatgttgatgttagcagcacaaaacatcttgaaccctaaagatggtaaacctgtagttacaccatcacaagatatggtacttggtaactattaccttactttagaaagaaaagatgcagtaaatacaggcgcaatctttaataatacaaatgaagtattaaaagcatatgcaaatggctttgtacatttacacactagaattggtgtacatgcaagttcgttcaataatccaacatttactgaagaacaaaacaaaaagattcttgctacgtcagtaggtaaaattatattcaatgaaatcattccagattcatttgcttatattaatgaacctacgcaagaaaacttagaaagaaagacaccaaacagatatttcatcgatcctacaactttaggtgaaggtggattaaaagaatactttgaaaatgaagaattaattgaacctttcaacaaaaaattcttaggtaatattattgcagaagtattcaacagatttagcatcactgatacatcaatgatgttagaccgtatgaaagacttaggattcaaattctcatctaaagctggtattacagtaggtgttgctgatatcgtagtattacctgataagcaacaaatacttgatgagcatgaaaaattagtcgacagaattacaaaacaattcaaccgtggtttaatcactgaagaagaaagatataatgcagttgttgaaatttggacagatgcaaaagatcaaattcaaggtgaattgatgcaatcacttgataaaactaacccaatcttcatgatgagtgattcaggtgcccgtggtaacgcatctaactttacacagttagcaggtatgcgtggattgatggccgcaccatctggtaagattatcgaattaccaatcacatcttcattccgtgaaggtttaacagtacttgaatacttcatctcaactcacggtgcacgtaaaggtcttgccgatacagcacttaaaacagctgactcaggatatcttactcgtcgtcttgttgacgtggcacaagatgttattgttcgtgaagaagactgtggtactgatagaggtttattagtttctgatattaaagaaggtacagaaatgattgaaccatttatcgaacgtattgaaggtcgttattctaaagaaacaattcatcatcctgaaactgatgaaataatcattcgtcctgatgaattaattacacctgaaattgctaagaaaattacagatgctggtattgaacaaatgtatattcgctcagcatttacttgtaacgcacgacatggtgtttgtgaaaaatgttacggtaaaaaccttgctactggtgaaaaagttgaagttggtgaagcagttggtacaattgcagcccaatctatcggtgaaccaggtacacagcttacaatgcgtacattccatacaggtggggtagcaggtagcgatatcacacaaggtcttcctcgtattcaagagattttcgaagcacgtaaccctaaaggtcaagcggtaattacggaaatcgaaggtgtcgtagaagatattaaattagcaaaagatagacaacaagaaattgttgttaaaggtgctaatgaaacaagatcataccttgcttcaggtacttcaagaattattgtagaaatcggtcaaccagttcaacgtggtgaagtattaactgaaggttctattgaacctaagaattacttatctgttgctggattaaacgcgactgaaagctacttattaaaagaagtacaaaaagtttaccgtatgcaaggtgtagaaatcgacgataaacacgttgaggttatggttcgacaaatgttacgtaaagttagaattatcgaagcaggtgatacgaagttattaccaggttcattagttgatattcataactttacagatgcaaatagagaagcatttaaacaccgtaagcgtcctgcaacagctaaaccagtattacttggtattactaaagcatcacttgaaacagaaagtttcttatctgcagcatcattccaagaaacaacaagagttcttacagatgcagcaattaaaggtaagcgtgatgacttattaggtcttaaagaaaacgtaattattggtaagttaattccagctggtactggtatgagacgttatagcgacgtaaaatacgaaaaaacagctaaaccagttgcagaagttgaatctcaaactgaagtaacggaataacaagtatataacagaggctaatgctttagcctcttgttatttttatgtaaattatttgatttaatgttgacgaattctcttgttcaatgttaatatattaaaggttgatgcaagcagaactttggaggataaattattgtctaaggaaaaagttgcacgctttaacaaacaacattttgtagttggtcttaaagaaacgcttaaagcgttaaagaaagatcaagttacatctttgattattgctgaagacgttgaagtatatttaatgactcgcgtgttaagccaaatcaatcagaaaaatatacctgtatcttttttcaaaagcaaacatgctttgggtaaacatgtaggtattaacgtcaatgcgacaatagtagcattgattaaatgagaattagtaagtgttttacttactaaattttatttaacctaaaaatgaaccacctggatgtgtgggattaaaaagtgaagagaggaggacatatcacatgccaactattaaccaattagtacgtaaaccaagacaaagcaaaatcaaaaaatcagattctccagctttaaataaaggtttcaacagtaaaaagaaaaaatttactgacttaaactcaccacaaaaacgtggtgtatgtactcgtgtaggtacaatgacacctaaaaaacctaactcagcgttacgtaaatatgcacgtgtgcgtttatcaaacaacatcgaaattaacgcatacatccctggtatcggacataacttacaagaacacagtgttgtacttgtacgtggtggacgtgtaaaagacttaccaggtgtgcgttaccatattgtacgtggagcacttgatacttcaggtgttgacggacgtagacaaggtcgttcattatacggaactaagaaacctaaaaactaagaatttagtttttaattaaatcttaaacttaaaatatttaatataaggaagggaggatttacattatgcctcgtaaaggatcagtacctaaaagagacgtattaccagatccaattcataactctaagttagtaactaaattaattaacaaaattatgttagatggtaaacgtggaacagcacaaagaattctttattcagcattcgacctagttgaacaacgcagtggtcgtgatgcattagaagtattcgaagaagcaatcaacaacattatgccagtattagaagttaaagctcgtcgcgtaggtggttctaactatcaagtaccagtagaagttcgtccagagcgtcgtactactttaggtttacgttggttagttaactatgcacgtcttcgtggtgaaaaaacgatggaagatcgtttagctaacgaaattttagatgcagcaaataatacaggtggtgccgttaagaaacgtgaggacactcacaaaatggctgaagcaaacaaagcatttgctcactaccgttggtaagataaaagcttttaccctgagtgtgttctatattaatgaattttcattaagcgttcatgcttagggcatcgccatatctatcgtatttattcagtaatataaactggaaggagaaaaaatacatggctagagaattttcattagaaaaaactcgtaatatcggtatcatggctcacattgatgctggtaaaacgactacgactgaacgtattctttattacactggccgtatccacaaaattggtgaaacacacgaaggtgcttcacaaatggactggatggagcaagaacaagaccgtggtattactatcacatctgctgcaacaacagcagcttgggaaggtcaccgtgtaaacattatcgatacacctggacacgtagacttcactgtagaagttgaacgttcattacgtgtacttgacggagcagttacagtacttgatgcacaatcaggtgttgaacctcaaactgaaacagtttggcgtcaggctacaacttatggtgttccacgtatcgtatttgtaaacaaaatggacaaattaggtgctaacttcgaatactctgtaagtacattacatgatcgtttacaagctaacgctgctccaatccaattaccaattggtgcggaagacgaattcgaagcaatcattgacttagttgaaatgaaatgtttcaaatatacaaatgatttaggtactgaaattgaagaaattgaaattcccgaagaccacttagatagagctgaagaagctcgtgctagcttaatcgaagcagttgcagaaactagcgacgaattaatggaaaaatatcttggtgacgaagaaatttcagtttctgaattaaaagaagctatccgccaagctactactaacgtagaattctacccagtactttgtggtacagctttcaaaaacaaaggtgttcaattaatgcttgacgctgtaattgattacttaccttcaccactagacgttaaaccaattattggtcaccgtgctagcaaccctgaagaagaagtaatcgcgaaagcagacgattcagctgaattcgctgcattagcgttcaaagttatgactgacccttatgttggtaaattaacattcttccgtgtgtattcaggtacaatgacatctggttcatacgttaagaactctactaaaggtaaacgtgaacgtgtaggtcgtttattacaaatgcacgctaactcacgtcaagaaatcgatactgtatactctggagatatcgctgctgcggtaggtcttaaagatacaggtactggtgatactttatgtggtgagaaaaatgacattatcttggaatcaatggaattcccagagccagttattcacttatcagtagagccaaaatctaaagctgaccaagataaaatgactcaagctttagttaaattacaagaagaagacccaacattccatgcacacactgacgaagaaactggacaagttatcatcggtggtatgggtgagcttcacttagacatcttagtagaccgtatgaagaaagaattcaacgttgaatgtaacgtaggtgctccaatggtttcatatcgtgaaacattcaaatcatctgcacaagttcaaggtaaattctctcgtcaatctggtggtcgtggtcaatacggtgatgttcacattgaattcacaccaaacgaaacaggcgcaggtttcgaattcgaaaacgctatcgttggtggtgtagttcctcgtgaatacattccatcagtagaagctggtcttaaagatgctatggaaaatggtgttttagcaggttatcctttaattgatgttaaagctaaattatatgatggttcataccatgatgtcgattcatctgaaatggccttcaaaattgctgcatcattagcacttaaagaagctgctaaaaaatgtgatcctgtaatcttagaaccaatgatgaaagtaactattgaaatgcctgaagagtacatgggtgatatcatgggtgacgtaacatctcgtcgtggacgtgttgatggtatggaacctcgtggtaatgcacaagttgttaatgcttatgtaccactttcagaaatgttcggttatgcaacatcattacgttcaaacactcaaggtcgcggtacttacactatgtacttcgatcactatgctgaagttccaaaatcaatcgctgaagatattatcaagaaaaataaaggtgaataatataacttgttttgactagctagcctaggttaaaatacaaggtgagcttaaatgtaagctatcatctttatagtttgattttttggggtgaatgcattataaaagaattgtaaaattctttttgcatcgctataaataatttctcatgatggtgagaaactatcatgagagataaatttaaatattatttttaattagaataggagagattttataatggcaaaagaaaaattcgatcgttctaaagaacatgccaatatcggtactatcggtcacgttgaccatggtaaaacaacattaacagcagcaatcgctactgtattagcaaaaaatggtgactcagttgcacaatcatatgacatgattgacaacgctccagaagaaaaagaacgtggtatcacaatcaatacttctcacattgagtaccaaactgacaaacgtcactacgctcacgttgactgcccaggacacgctgactacgttaaaaacatgatcactggtgctgctcaaatggacggcggtatcttagtagtatctgctgctgacggtccaatgccacaaactcgtgaacacattcttttatcacgtaacgttggtgtaccagcattagtagtattcttaaacaaagttgacatggttgacgatgaagaattattagaattagtagaaatggaagttcgtgacttattaagcgaatatgacttcccaggtgacgatgtacctgtaatcgctggttcagcattaaaagctttagaaggcgatgctcaatacgaagaaaaaatcttagaattaatggaagctgtagatacttacattccaactccagaacgtgattctgacaaaccattcatgatgccagttgaggacgtattctcaatcactggtcgtggtactgttgctacaggccgtgttgaacgtggtcaaatcaaagttggtgaagaagttgaaatcatcggtttacatgacacatctaaaacaactgttacaggtgttgaaatgttccgtaaattattagactacgctgaagctggtgacaacattggtgcattattacgtggtgttgctcgtgaagacgtacaacgtggtcaagtattagctgctcctggttcaattacaccacatactgaattcaaagcagaagtatacgtattatcaaaagacgaaggtggacgtcacactccattcttctcaaactatcgtccacaattctatttccgtactactgacgtaactggtgttgttcacttaccagaaggtactgaaatggtaatgcctggtgataacgttgaaatgacagtagaattaatcgctccaatcgcgattgaagacggtactcgtttctcaatccgtgaaggtggacgtactgtaggatcaggcgttgttactgaaatcattaaataatttctaatttcttagattttatataaaaagaagatccctcaatcgaggggtctttttttaatgtgtaaattttgtaatggctattcgatttagaagaacaataattgatgaaagactgactaataaaacttataactgataatactgtttaaataaaattgttgagtcttggacattgtaaaatgctcccttcaaagttttcattttttcaatgtctactttgaagggagcatttcattagtttatgtctcagattcatatctttcaattaatttaaatgcttaatttgttttaaatacttgctctaattctatgatttttaaaaatacagctacagcgtattttaatgatttttcatcaatatcaaatttgggattatggtgtggcgctgtaatacctttactttcattaccacaaccagtcagaaagaatgcacctggtcgtactttcaaataatgtgaaaaatcttctccaatcatcattaaatctgattcattaaagcgtacatgtaagtcatttgttgcttctttaataacttgatatgctttctcgttattatggacaggcaaataccctttaatataattcaaatcatagttaatatcatttgctattgctaaaccttgtagaagcttatccattttgtccattacatgattctgtatatctgaatcgaaagttctaactgtacctttacaaaatgcttgatcaggaataacgctatctgtggtgcctgcttgaatcattccaaatgaaagtacagcttgtttaactggatcgatcgtacgtgaaattattttttgtgcacttaaaatgaactctgccatgattactattgggtcaatggtttcatgaggtttggcaccatgaccaccacgacctttaaatgtgacgctaaattcatctggagaggccatgattgcccccgcacgtgaatgaatagttccagtaggataaccactccataaatgtgtaccgtaaattctatctacattttccagacatccagcatctatcatttcttgagaaccacctggcatgatttcttcaccgtactggaatattaatacaacattaccttctaataaatgtttatgttcatctaaaatctctgctacagtaagtaaaattgctgtatgaccatcatgcccacacgcatgcatacatcctggatttttagacttataaggcacatcgtttaattcctcgacaggtaacgcatcaaagtcagctcttaatgcaatggtaggtcctgtgcccaagcctttaaatgtggctttgataccattgcggccgataggagtttcaatatcacaagataactggcttaattggttaacaatataatcatgtgtttgaaattcttcaaaagataactcaggatattggtgtaaataacgtctgagttgaattgttttattttctttattatttgctagttggaaccaatctaacacccttatcactactttctaaaataatgtttatagtataacattttatgaaattatcgtactaaatgattgctttgagatattttatctatgaatgataaggctttcaagttatgtagaattactgtatgataaaggtattaccaaacaatacttaagggggattatatactgtggttcaatcattacatgagtttttagaggaaaatataaattatctaaaagaaaatggtttgtataatgaaatagatacaattgaaggtgcaaacggaccagaaatcaaaatcaatgggaaatcatacattaacttatcttcaaataattatttaggactagcaacaaatgaagatttgaaatcagctgcaaaagcagctattgatacacatggtgtaggtgcaggcgctgttcgtacaatcaatggtacattagatttacacgacgaattagaagaaacactagcaaaatttaaaggaacagaagctgcaatagcttatcaatcaggatttaattgtaatatggctgctatttcagctgtcatgaataaaaatgatgctattttatcagatgagcttaatcatgcatcaattattgatggatgtcgcttatctaaagctaaaattattcgagttaaccattcagacatggatgatttacgtgcgaaagcaaaagaagcagttgaatcaggtcaatacaataaagtgatgtatatcactgatggcgtttttagtatggatggtgatgtggctaaattacctgaaattgtagaaattgcagaagaatttggtttattaacttatgttgacgacgctcatggttcaggtgttatgggtaaaggcgctggtacggttaaacattttggtttacaagataaaatcgatttccaaataggtacgctttctaaagcaattggtgtcgttggcggttatgtagcaggtacaaaagagttaatagattggttaaaagcacaatcacgaccattcttattctctacatcattagcacctggggataccaaagcaataactgaagcagttaaaaagttaatggattcaactgaattacatgataaattatggaacaatgcacaatatttaaaaaatggattgtcaaaattaggatatgatacaggtgagtcagaaactccaattacaccagtaattattggtgatgaaaaaacaactcaagaatttagtaagcgtttaaaagacgaaggtgtctatgtgaaatctatcgttttcccaacagtaccaagaggtacaggacgtgtaagaaatatgcctacagctgcacatacaaaagacatgttagatgaagcaattgcggcttatgaaaaagtaggaaaagaaatgaagttgatttaatatttatttattcccacggcaaatattgtcgtgggctttttttaatgtttagtttattaacagtaagttcgtatatcaatgtttagtgctccccaaaattgaagtttgaattttaaaagcatcttgtagaatttagttgtatttttttcaaagaaattcattttgattatttttgataatgagcattttaatagtaatacatgtttatagtgtgtagtatatgtctatactagtagtaactatatagagaaagtaggaataaactatgtcacaagatgtaaatgaattaagtaagcaaccaacgccagataaagcagaagataacgcatttttcccatcaccatattcccttagtcaatatacagcacctaaaacagattttgatggtgttgaacacaaaggtgcctataaagatggtaaatggaaagtattgatgattgctgctgaagagcgatatgtattattggaaaatggaaaaatgttctctacgggtaatcatcctgttgaaatgttattacctttacatcatttaatggaagcaggttttgacgttgatgttgcgacattatctggttatccagttaaattagaattatgggctatgccaactgaagacgaggcagttataagtacttataataaattgaaagaaaaattaaaacagccaaaaaaattagcagatgtgattaaaaatgaattaggacctgattcagactatttatctgtctttatcccaggcggacatgctgcagttgttggtatttctgaaagtgaggacgttcaacaaacattagattgggcattagacaatgaccgctttatagttacattatgtcatggaccagcagcactactttcagcagggcttaacagagaaaaatctccattagaaggatactctgtttgtgtcttccctgactcattagatgaaggtgcaaatattgaaataggttatttacctggacgcttgaaatggttagttgctgatttattaactaaacaaggattaaaagtagttaacgacgatatgacaggaagaacgttaaaagatcgtaaattattaacaggtgacagtcctttagcttcaaatgagttaggaaaattagcagttaatgaaatgttaaatgcaatacaaaataaataattaaatattaattagaggagcctcatatgtaaatgtatgagggctctttttttttggcaaaatttaagtgatacttgtaaaatagaacctattatgagtatgatttaagaaaacgcttgcaaaactaataaccgcaactagcgatatggaggaaacatgatgtcttatagcattggaattgattatggaactgcttcaggccgtgtgtttttaattaatacaactaacggtcaagtagtatcaaaatttgtgaaaccatatacacatggtgtcattgagagtgaattaaatggtttgaaaataccacatacatatgcacttcaaaatagtaatgattatttagaaattatggaagaaggaatatcatatatagtacgtgaatcaaaaatagatccagacaatatagtaggtattggtatagactttacttcatctactattatttttactgacgaaaaccttaacccggtacataacttaaaacaatttaaaaacaatccacatgcgtatgtgaaactttggaaacatcatggtgcatataaagaggcagagaaattatatcaaactgctattgaaaataataataagtggttaggccattatggatataatgttagtagtgaatggatgattcccaaaataatggaggtcatgaatcgagcaccagaaattatggaaaaaacggcttatattatggaagcgggcgattggattgtaaataaattaactaataaaaatgtacgctcgaattgtggattaggtttcaaagcattttgggaagaagaaacagggtttcattatgatttatttgataaaatagaccccaaattatcaaaagtaattcaagataaagtatctgcaccggttgttaatattggtgaagcagtagggaaactggatgataaaatggcacagaaattaggattatcaaaagaaactatggtaagtccttttattattgatgcccatgctagtttattaggtattgggtctgaaaaagataaagaaatgactatggtgatgggaacaagcacatgccatcttatgttaaatgaaaagcaacatcaagtgccaggtatatcaggttctgtaaaaggagcaattattccagaattatttgcttatgaagcggggcaatcagcagtaggtgatttgtttgagtatgtcgctaagcaagcaccaaagtcatatgtagatgaagcagaaaatagaaatatgactgtatttgaattaatgaatgaaaagataaaacatcaaatgccaggtgaaagtgggctcattgctcttgattggcataatggaaatcgaagtgtattaagtgatagcaatttaacaggttgtatctttggattaactttacaaactaagcatgaggatatttatagagcatatttagaagctacagcatttggtactaagatgattatgcaacagtatcaagattggcatatggaagtagaaaaggtatttgcatgtggcggtatacctaaaaagaatgctgttatgatggatatctatgcgaatgtactgaataaaaaactaattgttatggatagtgagtatgcaccagcaataggcgcagcaatattaggtgcagtcagtggtggcgcacataattcaattaatgacgcagttgatgctatgaaagagccaattttatacgaaattaatccagaagcggaaaaagtacaaaggtatgaaacattatttaaagcttataaggctttacatgatatccatggttataaaaaagctaatataatgaaagatatccagagtttaagagttgagggataaaaaatttaatttgacagtaattagcaataataaacgctataaattactaaaatcaattaatacaactagaatttccatttacagaaatatcagcaacatgtacatgtcatatatacaagaaagcgcttttatattataattattatgaaaatgaatattatgtccgcttgtgatggactatagctatatagaagagacaaaggagatatttctatgaaaaaaattatgattactggtgcattaggacaaattggtacagaattagttgttaagtgcagagaaatttatgggacagataatgttcttgctacagatattagggaacctgaagcagactcacctgtacaaaatggaccatttgaaatcttagacgtaacagatcgtgaccgtatgtttgagttagttagggactttgaagcggatagtctaatgcatatggcagcattattatcagcaactgctgagaaaaatccaattctagcttgggatttaaatatgggtggattaatgaatgcattagaagctgcaagaacttataatttgcactttttcacaccaagttcaattggtgcatttggagactcaactcctaaagttaatacgccacaagtaacgattcagcaacctacgacaatgtatggtgtaaataaagtagctggagaattattgtgtcaatactatttcaaacgttttggtgtagatacaagaagtgttagattcccaggtttaatctcgcatgttaaagagccaggtggcggtactacagactatgctgttgaaatatacttcaaagcagtaagagagggtcattatacaagcttcatagataaaggcacgtatatggatatgatgtatatggatgatgcaattgaagcaattattaaacttatggaagcagacgacgctaaattagaaactagaaatggttataatttgagcgcaatgagttttgatccagagatggtaaaagaagcaattcaagaatactatcccaattttacattagattacgatgttgatcctattagacaaggtatcgctaatagttggccggattctattgatacaagctgttcacgtggcgaatggggatttgatcctaaatatgatttagcgagcatgactaaattaatgttagaagctattgaacaaaaagatactgttaaaaataataactaatcatttccattcactttaatacacggaatgatattttaaattactctttattttaataaactagtgcatgaattctaatattattcattatacttattgaattcgcgagcttagttcattttaaagtaaagagttttttgtatgtaaagtatattagtaaaacacagattacttgtctctgtgaaattaatacgtttatactaaaagatatagtctttctagaaatctgttaattaattttgaatttttagaaaatttgttgaacagcaaaatatggattgttataatttaagttaaacaaattcttatacaatattattaggaggcaatcaccatgtcacaagcagttaaagttgaacgacgagaaacattaaaacaaaaaccaaatacatctcaactaggttttggtaaatattttactgattatatgttgagttatgattatgatgcagataaaggatggcatgatttgaagatagtaccttatggtcctattgaaatttcacctgctgcacaaggtgttcattatggtcaatcggtattcgaaggattaaaagcatataaaagagatggggaagttgcacttttccgtcctgaagaaaattttaagcgtcttaataactcgttagcacgattagaaatgcctcaagtagacgaagcagaattgttagaggggctaaaacaattagttgatattgaaagagattggattcctgaaggggaaggtcaatcattatatattcgtccatttgtttttgcaacagaaggggcacttggcgttggtgcatcacatcagtataaattattaattattttatctccttcaggtgcatattatggtggtgaaactttaaaaccaactaaaatctatgtagaagatgaatatgtgcgtgctgttcgtggcggtgtaggctttgcaaaagttgcaggtaactatgcggcaagtttattagcacaaactaatgcaaataaattaggttatgaccaagtattatggcttgatggtgttgaacagaaatatatcgaagaagttggtagcatgaacattttcttcgttgaaaatggcaaagtaattacaccagagttgaatggcagtattttacctggtattacacgtaaatctattatcgaattagctaaaaacttaggatatgaagtcgaagagcgccgcgtttcaatcgatgaattattcgaatcatatgataaaggtgagttaacagaagtatttggtagtggtactgcagcagttatttcacctgtgggtacattgagatacgaagatcgtgaaatcgttattaataataatgagactggtgaaattactcaaaaattatacgacgtctatactggtattcaaaatggtactttagaagataaaaatggttggagagtcgttgtaccaaaatattaataaaaattgaatataatcatgaaaacaatatgcaaaagttaatcatgactaaaatccctttcaatgaagcgaagcatggtaataaattaagtttacaatgtttattgttaagtattgaaggggatttcacttattattatatttaattcaatatttaaatagaacaatactacgagttcattttcaggggataacgaatatcatagaatcagcataatacgaaataaataaataggagtattgatatcaatggaatggatattatttgataaagatggtacgttaattgaatttgatagaagttgggaaaaaataggggtacgatttgtacaatcattgcttgagactttcccagtacataataaagaagctgctttaagacaactcggtgtcattaaagaatctattgatccaaaatcagtgatgggttcaggatctttacaacaaattatccaggcatttaatgatgtgacgggacaagatacaaccgactggtccaagtcaacaagtcaaaagctggtagatgaacgtattcctgaaattaattgggtagaaggtgttaaagaagcacttatcgatttgaaagcaaaaggctatcaacttggtattgttacgagtgatactaaaaaaggtgtagaacaatttttagcacataccaatgctacctcgttgttcgatttgatcatttctaccgaagcggatgcctatgagaagccaaatcctaaagtattatcgcctttatttgagcaatataatgtagatcctcagaaagtagctatagtaggagacactgctaatgatatgaagacagcaagtaatgcaaatttaggtatggcaataggtgtattaacaggtattgcaacaaaagaagaattacatgaagctgatattattttaaatagtgcggcagatattttagaagctttaaattaaaaagaaagacatagtgtatatgtgaattaatgtattcgatagaattgataaaataatcgataatatctatggaatatacattgaatataaacatatacgctatgtctttagtcttttatcgtgtatctacttgtcgatatgtttgaataattcgagcaattttgtttatcataggatttaaagattcggggtccttatggatatcatattcattaatattgatacgtacaactggacatgcattaaagctattaatccaatcgtcatagcgtttaaatagctttttccagtattcagggtctgtattaatttccatttcgcgaccacgttcaataatacgatcaatgacctcatcatagttacattctaaataaatcattacatcaggtttaggaaaataaggtgtcatgaccatggcattaaataagtctgaatatgttttgaaatcttctttactcattgtgccttcttcttcatgcatttttgcaaaaatatcaacatcttcataaattgatcgatcttggacaaagccaccaccatattcaaacatacgcttttgttctttaaaacgttcagctaagaagtaaatttgcaaatggaaactccatcgttcaaaatcgctgtaaaatttatctaaatatggattatgttcgacattttcaaaagacgttttaaagtttaatttatctgcaagtgcttgcgttagtgttgattttccaacaccaactgtacctgcaatggttataatggcattttgtggaataccgtaattattcattggtaatatctcctatcataggtaatataatatgtaatatatcttcgtaatcttgttcatttttaagaaaatcaatagaagttgtatcgattaaaactacatttgaaccattactttgtaaggactcataatactcacgataatctttttttaactttaacagatattcatcttctatttgatgctcaaaactacggttacgtttagcaattctagattttaacacatcaaggtctgcatctaaaaagataatcatattcggcataatcatatcttcagttaaaatatcataaattttactgaatttctgaaattcaacagaactcaaagtatttttagcaaatatcttatttttatgtatatgataatcactaactacaccttgatttagttgtgttacatcttgaaattgcttatatctattgcataaaaagaacatttcagtttgaaaactccatttagagatatcttcataaaagtctgataaaaatggattttctgtgatgatttctttttcttcataaaaatctaaagtttgacttaatttgtgtgcaagtgaagatttacctacgccaataggaccttcaattgctataaaaggtttgttcatattcacatctccaaatgttaaaatagacattgagtattgtaccataagtgaggtatctggacataaatgacaaatgatatatattttatgacattagcgattgaagaagctaaaaaagcagctcaactaggcgaagtacctataggtgctatcatcactaaagatgatgaagttatcgctagagcacataatttaagagaaacactacaacaaccaacggcgcatgctgaacatattgcaattgaacgtgcagccaaagtgttaggtagttggcgtttagaaggttgcacattatatgtaaccttagaaccatgtgtcatgtgcgcaggaacaattgtaatgagtcgcattccaagagtcgtctatggcgcagatgatcctaaaggtggttgtagtggcagtttaatgaatttattgcaacaatctaattttaatcatcgtgcaattgttgataaaggtgtacttaaagaagcatgtagcacattattaacaacattttttaaaaacttaagagccaataagaaatccaccaattagacgatagtacatactaattaaaatttgttagaattacattatatgataaattaatgacaatataaatgttaatagaaaagtatgtgcgctgagtatatattcttatttaagaacaagattttaaatttacgaaacgaggtaacataatgataaaactaatagccactgatatggatggcacgctacttaatgcagcacatgaaatttctcaacctaatattgatgcgattaaatacgctcaagaacaagggataacggttgttatcgcgacaggtcgagcattttatgaagcacaagcaccagttgctgacacagatttaacagtaccatatatttgtttgaatggtgctgaagtacgtgatgaaactttcaatgtaatgagcacttcacaccttaataaatcgttagtacacaaaattacaaatgttttaaaagatgcaggtatttattatcaagtatacacgagtcgtgcgatttatactgaagatccacaaagagatttagacatttacatagatattgctgagcgtgcaggtcaacatgcaaacgttgagcgtattaaaaatggtattcaaagacgcatagataatggtacgttgaaagttgttgataattatgatgctattgaaaacatacctggtgaattaattatgaaaatattagcatttgatggaaatttagaaaaaattgacaaagctagtaaaattttagctgaatctccgaatttagctatatcatcatcttcgagaggaaatatagaaataacgcattcagatgcacaaaaaggtattgcgctagaaacaattgccgaaagattagggattgaaatgaaagaagtcatgtcaataggtgacaatttaaatgacttatcaatgttagagaaagttggctatccagttgcgatggaaaatggtgcagaagaagttaaaaaaatagcgaaatatgtcacagatacgaatgaaaatagtggtgttggaaaagctattatgaaattattacgtgaacaacaagtttaataaaaaaagaggggtcaaatatgaaaggattaattattattggcagtgcacaagtgaattcacatacaagtgcactagcaagatacttaactgagcattttaaaacacatgatattgaagcggaaatattcgatttagcagaaaaaccgttaaatcaattagatttttcaggaacaacaccgtctattgatgaaatcaaacaaaatatgaaagatttaaaagagaaagcaatggcggcggactttttaatattaggaacgccaaactatcatggttcatattctggaatattgaaaaatgcattagatcatctaaatatggattattttaaaatgaaacctgtaggcttaataggaaatagtggtggtattgttagttcagagccattgtcacatttaagagtaatcgtcagaagtttactaggcattgctgtaccaactcaaatagcaacacatgattctgattttgctaaaaatgaagatggttcatattacttaaatgatagtgaattccaattacgagcaagattatttgtcgatcaaattgtatcttttgtgaataatagtccatatgaacatttaaaataatattaaaaaatatgtaaatatacattaaaaataggtatgtagcttaaggtatttcattgagaatgcttttaagtcacatgcctattttttgttctaatgcaccaatagtaagcctttgatattactgttgtgagcaatgttattaattaaaataagatgtaatagcgaattgaaaacaagcttagattaaaagtgagttttaaaaatatagataaataatttaaagcaattaaagaaaaaaagtattaaaaattgcaattcttaaactgtgattcatattaatatttctagcaaataacattgtaaaataaagaaaaataattaaagtattgcactttattgaaatttatattacgatagtaatgcagaaatttatatatgcaaaatattatatttatcaaattttgatattttaaaggagtattattaaatgaataataaaaagacagcaacaaatagaaaaggcatgataccaaatcgattaaacaaattttcgataagaaagtattctgtaggtactgcttcaattttagtagggacaacattgatttttgggttaagtggtcatgaagctaaagcggcagaacatacgaatggagaattaaatcaatcaaaaaatgaaacgacagccccaagtgagaataaaacaactaaaaaagttgatagtcgtcaactaaaagacaatacgcaaactgcaactgcagatcagcctaaagtgacaatgagtgatagtgcaacagttaaagaaactagtagtaacatgcaatcaccacaaaacgctacagctaatcaatctactacaaaaactagcaatgtaacaacaaatgataaatcatcaactacatatagtaatgaaactgataaaagtaatttaacacaagcaaaagatgtttcaactacacctaaaacaacgactattaaaccaagaactttaaatcgcatggcagtgaatactgttgcagctccacaacaaggaacaaatgttaatgataaagtacatttttcaaatattgacattgcgattgataaaggacatgttaatcagactactggtaaaactgaattttgggcaacttcaagtgatgttttaaaattaaaagcaaattacacaatcgatgattctgttaaagagggcgatatatttacttttaaatatggtcaatatttccgtccaggatcagtaagattaccttcacaaactcaaaatttatataatgcccaaggtaatattattgcaaaaggtatttatgatagtacaacaaacacaacaacatatacttttacgaactatgtagatcaatatacaaatgttagaggtagctttgaacaagttgcatttgcgaaacgtaaaaatgcaacaactgataaaacagcttataaaatggaagtaactttaggtaatgatacatatagcgaagaaatcattgtcgattatggtaataaaaaagcacaaccgcttatttcaagtacaaactatattaacaatgaagatttatcgcgtaatatgactgcatatgtaaatcaacctaaaaatacatatactaaacaaacgtttgttactaatttaactggatataaatttaatccaaatgcaaaaaacttcaaaatttacgaagtgacagatcaaaatcaatttgtggatagtttcacccctgatacttcaaaacttaaagatgttactgatcaattcgatgttatttatagtaatgataataaaacagctacagtcgatttaatgaaaggccaaacaagcagcaataaacaatacatcattcaacaagttgcttatccagataatagttcaacagataatggaaaaattgattatactttagacactgacaaaactaaatatagttggtcaaatagttattcaaatgtgaatggctcatcaactgctaatggcgaccaaaagaaatataatctaggtgactatgtatgggaagatacaaataaagatggtaaacaagatgccaatgaaaaagggattaaaggtgtttatgtcattcttaaagatagtaacggtaaagaattagatcgtacgacaacagatgaaaatggtaaatatcagttcactggtttaagcaatggaacttatagtgtagagttttcaacaccagccggttatacaccgacaactgcaaatgtaggtacagatgatgctgtagattctgatggactaactacaacaggtgtcattaaagacgctgacaacatgacattagatagtggattctacaaaacaccaaaatatagtttaggtgattatgtttggtacgacagtaataaagatggtaaacaagattcgactgaaaaaggaattaaaggtgttaaagttactttgcaaaacgaaaaaggcgaagtaattggtacaactgaaacagatgaaaatggtaaataccgctttgataatttagatagtggtaaatacaaagttatctttgaaaaacctgctggcttaactcaaacaggtacaaatacaactgaagatgataaagatgccgatggtggcgaagttgatgtaacaattacggatcatgatgatttcacacttgataatggctactacgaagaagaaacatcagatagcgactcagattctgacagcgattcagactcagatagcgactcagattcagatagcgactcagattcagacagcgattcagacagcgactcagactcagatagcgattcagattcagacagcgactcagactcagacagcgattcagactcggatagcgactcagactcagatagcgactcagattcggatagcgactcagactcagatagcgattcagattcagatagcgattcggactcagacagtgattcagattcagactcagatagcgactcagattctgacagcgattcagactcagacagcgactcagactcagacagtgattcagattcagacagcgactcagattcagatagcgactcagactcagatagcgactcagactcagatagcgactcagactcggatagcgattcagattcagacagcgactcagattcagatagcgattcggactcagacaacgactcagattcagatagcgattcagattcagatgcaggtaaacatactccggctaaaccaatgagtacggttaaagatcagcataaaacagctaaagcattaccagaaacaggtagtgaaaataataattcaaataatggcacattattcggtggattattcgcggcattaggatcattattgttattcggtcgtcgtaaaaaacaaaataaataatatgattaacttaaccaggtccatgtggcctggttttttctgtttagaaattcccagatataaaacaaaaaatctttaaggaatagatacaatttaatttgttacagaaatgtaattgtctatgaattagaaaagctaagatattaatttcaagggcaaataatactattttttatgatgattaaataaagattacaaaactcataaaaacttttatttaaacacaaatgttaaataacgttttacgataaagaaaaataattaaagtattgtgctttatctaaaaatgtaatactatattgatatacatttttgtatttaaaacaattgtattatttaaaaatttgatgaattaggagtaatctaatgctaaacagagaaaataaaacggcaataacaaggaaaggcatggtatccaatcgattaaataaattttcgattagaaagtacacagtgggaacagcatcaattttagtaggtacaacattaatttttggtctggggaaccaagaagcaaaggctgcagaaagtactaataaagaattgaacgaagcgacaacttcagcaagtgataatcaatcgagtgataaagttgatatgcagcaactaaatcaagaagacaatactaaaaatgataatcaaaaagaaatggtatcatctcaaggtaatgaaacgacttcaaatgggaataaattaatagaaaaagaaagtgtacaatctaccactggaaataaagttgaagtttcaactgccaaatcagatgagcaagcttcaccaaaatctacgaatgaagatttaaacactaaacaaactataagtaatcaagaagcgttacaacctgatttgcaagagaataaatcagtggtaaatgttcaaccaactaatgaggaaaacaaaaaggtagatgccaaaactgaatcaactacattaaatgttaaaagtgatgctatcaagagtaatgatgaaactcttgttgataacaatagtaattcaaataatgaaaataatgcagatatcattttgccaaaaagtacagcacctaaacgtttgaatacaagaatgcgtatagcagcagtacagccatcatcaacagaggctaaaaatgttaatgatttaatcacatcaaatacaacattaactgtcgttgatgcagataaaaacaataaaatcgtaccagcccaagattatttatcattaaaatcacaaattacagttgatgacaaagttaaatcaggtgattatttcacaattaaatactcagatacagtacaagtatatggattgaatccggaagatattaaaaatattggtgatattaaagatccaaataatggtgaaacaattgcgactgcaaaacatgatactgcaaataatttaattacatatacatttacagattatgttgatcgatttaattctgtacaaatgggaattaattattcaatttatatggatgctgatacaattcctgttagtaaaaacgatgttgagtttaatgttacgataggtaatactacaacaaaaacaactgctaacattcaatatccagattatgttgtaaatgagaaaaattcaattggatcagcgttcactgaaacagtttcacatgttggaaataaagaaaatccagggtactataaacaaacgatttatgtaaatccatcggaaaattctttaacaaatgccaaactaaaagttcaagcttaccactcaagttatcctaataatatcgggcaaataaataaagatgtaacagatataaaaatatatcaagttcctaaaggttatacattaaataaaggatacgatgtgaatactaaagagcttacagatgtaacaaatcaatacttgcagaaaattacatatggcgacaacaatagcgctgttattgattttggaaatgcagattctgcttatgttgtaatggttaatacaaaattccaatatacaaatagcgaaagcccaacacttgttcaaatggctactttatcttcaacaggtaataaatccgtttctactggcaatgctttaggatttactaataaccaaagtggcggagctggtcaagaagtatataaaattggtaactacgtatgggaagatactaataaaaacggtgttcaagaattaggagaaaaaggcgttggcaatgtaactgtaactgtatttgataataatacaaatacaaaagtaggagaagcagttactaaagaagatgggtcatacttgattccaaacttacctaatggagattaccgtgtagaattttcaaacttaccaaaaggttatgaagtaaccccttcaaaacaaggtaataacgaagaattagattcaaacggcttatcttcagttattacagttaatggcaaagataacttatctgcagacttaggtatttacaaacctaaatacaacttaggtgactatgtctgggaagatacaaataaaaatggtatccaagaccaagatgaaaaaggtatatctggcgtaacggtaacattaaaagatgaaaacggtaacgtgttaaaaacagttacaacagacgctgatggcaaatataaatttactgatttagataatggtaattataaagttgaatttactacaccagaaggctatacaccgactacagtaacatctggtagcgacattgaaaaagactctaatggtttaacaacaacaggtgttattaatggtgctgataacatgacattagatagtggattctacaaaacaccaaaatataatttaggtaattatgtatgggaagatacaaataaagatggtaagcaggattcaactgaaaaaggtatttcaggcgtaacagttacattgaaaaatgaaaacggtgaagttttacaaacaactaaaacagataaagatggtaaatatcaatttactggattagaaaatggaacttataaagttgaattcgaaacaccatcaggttacacaccaacacaagtaggttcaggaactgatgaaggtatagattcaaatggtacatcaacaacaggtgtcattaaagataaagataacgatactattgactctggtttctacaaaccgacttacaacttaggtgactatgtatgggaagatacaaataaaaacggtgttcaagataaagatgaaaagggcatttcaggtgtaacagttacgttaaaagatgaaaacgacaaagttttaaaaacagttacaacagatgaaaatggtaaatatcaattcactgatttaaacaatggaacttataaagttgaattcgagacaccatcaggttatacaccaacttcagtaacttctggaaatgatactgaaaaagattctaatggtttaacaacaacaggtgtcattaaagatgcagataacatgacattagacagtggtttctataaaacaccaaaatatagtttaggtgattatgtttggtacgacagtaataaagacggcaaacaagattcaactgaaaaaggtatcaaagatgttaaagttactttattaaatgaaaaaggcgaagtaattggaacaactaaaacagatgaaaatggtaaatactgctttgataatttagatagcggtaaatacaaagttatttttgaaaagcctgctggcttaacacaaacaggtacaaatacaactgaagatgataaagatgcagatggtggcgaagttgacgtaacaattacggatcatgatgatttcacacttgataatggatactacgaagaagaaacatcagatagcgactcagattcggacagcgactcagattcagacagagactcagactcagatagtgattcagactcggatagcgattcagattcagacagcgattcagattcagatagcgattcagattcagacagagactcagatagtgattcagactcagatagcgactcagattcagacagcgactcagattcagacagcgactcagactcagatagtgattcagactcagatagcgactcagattcagacagcgactcagactcagacagcgactcagactcagatagtgactcagattcagatagcgactcagattcggacagcgattcagactcagatagcgactcagattcagatagcgattcggactcagatagcgactcagattcagatagtgattcagactcagatagcgactcagattcagacagcgactcagattcggatagcgactcagattcagacagcgactcagactcggatagtgattcagactcagatagcgactcagactcagatagcgattcagattcagatagcgactcagactcagacagcgattcagactcagacagcgactcagactcagatgcaggtaagcacacacctgttaaaccaatgagtactactaaagaccatcacaataaagcaaaagcattaccagaaacaggtaatgaaaatagcggctcaaataacgcaacgttatttggcggattattcgcagcattaggatcattattgttattcggtcgtcgtaaaaaacaaaataaataatacagcttataccaggtccgtgaggcctggttttttatttcaaaatttatgaaatgtatcttatgtttgagattaaatagtgcaattttttaaaaaatataacataaatcaacataaatttaattcatctttacattaaaagtacaaacgaataagaaaagcaattaaacacagtatcaaaccatttaaaacaattgatataaaaaacaaacgaataattaaaaagtactagaattaatttattcaaaccaaagtgtaaaataacagtcttagataaataaatttatttaaagtattgtgctttatctaaaaatgtattacgatgggaatacaaatttttatatgtaaaaatattaattttttgcaaatattgatattttaaaggagatttatatgattaacagggataataaaaaggcaataacaaaaaagggtatgatttcaaatcgcttaaacaaattttcgattagaaagtatactgtaggaactgcatcgattttagtaggtacgacattgatttttggtctagggaaccaagaagctaaagctgctgaaaacactagtacagaaaatgcaaaacaagatgatgcaacgactagtgataataaagaagtagtgtcggaaactgaaaataattcgacaacagaaaataattcaacaaatccaattaagaaagaaacaaatactgattcacaaccagaagctaaaaaagaatcaacttcatcaagtactcaaaaacagcaaaataacgttacagctacaactgaaactaagcctcaaaacattgaaaaagaaaatgttaaaccttcaactgataaaactgcgacagaagatacatctgttattttagaagagaagaaagcaccaaataatacaaataacgatgtaactacaaaaccatctacaagtgaaccatctacaagtgaaattcaaacaaaaccaactacacctcaagaatctacaaatattgaaaattcacaaccgcaaccaacgccttcaaaagtagacaatcaagttacagatgcaactaatccaaaagaaccagtaaatgtgtcaaaagaagaacttaaaaataatcctgagaaattaaaagaattggttagaaatgatagcaatacagatcattcaactaaaccagttgctacagctccaacaagtgttgcaccaaaacgtgtaaacgcaaaaatgcgctttgcagttgcacaaccagcagcagttgcttcaaacaatgtaaatgatttaattaaagtgacgaagcaaacaatcaaagttggcgatggtaaagataatgtggcagcagcgcatgacggtaaagatattgaatatgatacagagtttacaattgacaataaagtcaaaaaaggcgatacaatgacgattaattatgataagaatgtaattccttcggatttaacagataaaaatgatcctatcgatattactgatccatcaggagaggtcattgctaaaggaacatttgataaagcaactaagcaaatcacatatacatttacagactatgtagataaatatgaagatataaaatcacgcttaactctatattcgtatattgataaaaaaacagttccaaatgagacaagtttgaatttaacatttgctacagcaggtaaagaaacaagccaaaatgtcactgttgattatcaagatccaatggtccatggtgattcaaacattcaatctatctttacaaaattagatgaagataagcaaactattgaacaacaaatttatgttaacccattgaaaaaatcagcaaccaacactaaagttgatatagctggtagtcaagtagatgattatggaaatattaaactaggaaatggtagcaccattattgaccaaaatacagaaataaaggtttataaagttaactctgatcaacaattgcctcaaagtaatagaatctatgattttagtcaatacgaagatgtaacaagtcaatttgataataaaaaatcatttagtaataatgtagcaacattggattttggtgatattaattcagcctatattatcaaagttgttagtaaatatacacctacatcagatggcgaactagatattgcccaaggtactagtatgagaacaactgataaatatggttattataattatgcaggatattcaaacttcatcgtaacttctaatgacactggcggtggcgacggtactgttaaacctgaagaaaagttatacaaaattggtgactatgtatgggaagacgttgataaagacggtgttcaaggtacagattcaaaagaaaaaccaatggcaaacgttttagttacattaacttacccggacggtactacaaaatcagtaagaacagatgctaatggtcattatgaattcggtggtttgaaagacggagaaacttatacagttaaattcgaaacgccaactggatatcttccaacaaaagtaaatggaacaactgatggtgaaaaagactcaaatggtagttcggttactgttaaaattaatggtaaagatgatatgtctttagatactggtttttacaaagaacctaaatacaacttaggtgactatgtatgggaagatactaataaagatggtatccaagatgcaaatgagccaggaatcaaagatgttaaggttacattaaaagatagtactggaaaagttattggtacaactactactgatgcctcgggtaaatataaatttacagatttagataatggtaactatacagtagaatttgaaacaccagcaggttacacgccaacggttaaaaatactacagctgatgataaagattctaatggtttaacaacaacaggtgtcattaaagatgcagataatatgacattagacagtggtttctataaaacaccaaaatacagtttaggtgattatgtttggtacgacagtaataaagacggcaaacaagattcaactgaaaaaggtatcaaagatgtgacagttacattgcaaaacgaaaaaggcgaagtaattggaacaactaaaacagatgaaaatggtaaatatcgtttcgataatttagatagcggtaaatacaaagttatttttgaaaagcctgctggcttaacacaaacagttacaaatacaactgaagatgataaagatgcagatggtggcgaagttgacgtaacaattacggatcatgatgatttcacacttgataacggatacttcgaagaagatacatcagacagcgattcagactcagatagtgactcagacagcgactcagactcagacagcgactcagactcagacagtgattcagattcagacagcgactcagattcagatagcgactcagattcggacagcgattcagactcagatagcgactcagattcagatagcgattcagactcagacagcgactcagattcagatagcgattcggactcagacagcgattcagactcagatagcgactcagactcagacagcgactcagattcagatagcgattcggactcagatagcgactcagattcagacagcgattcagactcagatagcgactcagactcagacagtgattcagattcagacagcgactcagactcagatagcgactcagattcggacagcgactcagactctgatagcgactcagactcagacagtgattcagacagcgattcagactcggatgcaggaaaacatacacctgttaaaccaatgagtactactaaagaccatcacaataaagcaaaagcattaccagaaacaggtagtgaaaataacggctcaaataacgcaacgttatttggtggattatttgcagcattaggttcattattgttattcggtcgtcgcaaaaaacaaaacaaataatacaatatgacccaggtccttgtggcctggtttttttataattacacatgcaatagatgtatttttcatataaaataaacaataaagatacggaataaaacttatatgaggcgataatatgaattacattttaggaacaattttagaaagtaaaattacaggtgtagaaaaagcgcaaataaatagattgaagttgttcaaacaacacggcatatcttcaaaatgtgtatatgttaaatggaatccttattcatacacatatgcgaagcaacatcagattgaaaatgatgtatttacaatgtatgactattttcaaaaagcaatcaattataaaaagacaaagcaagttaactggatacagtattgggaaaagtcatgtaggtacacattgaaatttgtggaaaattcaaatgatgtcagaatatatgatgaagagcaatttgtaatgtatgctcattttttagataaacagtatcatcaattaaattatgtgaattattttgatcataaaagaagaaaagtaaaacgcgaattgtatgatggaagaggctttttaagttgttctcgaattttaggtgaaggacaacggattgtactcgaaaattactatacacctaatggggaaatcgtcatccaaaaatattttgacgatataaaagggaaaaacacgctcacaaaggttatcttaaatgaagaccagcatcaacaattttttgatacagaagatgaattagttcaatattttctccatcaattatgtaaaaataatgatcaaatcatattagatcgtcctcatgaattaggaaatgttatagcgggattaaatcaaagtattccagttattgttgtactccatagtacacatttatccggtgccggtaatggtataaaaagtttttataaaacagtgtttaataatttaacacgttataaagcgattgttgtatcaacagaaaagcaatgccaagatatttcacaatatattgaaaataaaataccagttatcaatattccggttggctacgtggcaaatttaaagtatcaatttgacatcaatcaaaaggagaaaaatcatatcatatcaattgctcgcctcgttgaaaataaacaaattaaacatcaaattgaagtaatcaagcaattagtaacaaaacatcccaatattcaattgaatatttatggacatggaaatggtttgtcagaatatcgacaacttgtagaagattatcatttatcggaacatgttaaatttcatggttttaagacgcatattaatgaagagattgctaaagcagaactgatgttatcgacaagtaaaatggaaggttttggcttagcaattttagagtcgctttcagtaggtacaccagtgatcagttatgatgtagattatggtccatcagaactgattcaagatggatttaatggctatttagtacctcaaggtgacatcaatcaaatggttgaaaaggtcgaccaattactaaataatactcaaaaattgcaacagttttcaattaatagcatagaatctgcacaacagtacaatgcaactactatcagtacaaagtggcaaaatattttaaactaagtcaaaagaaaaaagcattttcctagaatcatctatttaacaaacctcgttcatacgaacttacatgtttagttaaatgacataggaaaatgctatttttgtaaaaataaaggtaaagtacatttatataagacgaacaaattggtcccattgtttaattaacgacgctttactatattgttgtgcttttgccaaactaccttttgacagtcgttgctgtacttcaggatgatcaatcacatattttactttatcaaatagggcatcttcatcatttttagtaattaaataaccattgaaatctgaagtaatcagttcgttaggtccatatttaatatcataactaataactggaacaccatgtgctaaagattcaagtagcgctaaagagaaaccttccatgttacttgttattaaactcaaataggcatcgctatattcttggtctagattgcttaaaaagccgcgtaagtaaacatgattttccaatccatatttttgtatcaattcatttaattttttactttcagaaccaaaaccatacatatgaagctctatttttgggacatacgatactaagcgtttaattaattcaatttgttgatgtaattgtttttcaggtgaataacgagcaacggaaattaatttaacactgcgctgatctaatgtttggactggtgtatcaattgtttcactatagccgacaggaatattaacaactggaatagtatggttaatacgtttttcaacatctaatttttgctgctcagtagaaacgataattgcacgatatcgagataaattttcaaacatcgctttatatacatttttaaatggcgatgaatctaatgcatcaatatttttaatgtgtgtactgtgaagcacagctactactgggattgactcaggcgttaagttgaaaataggtgctgtgtacacattacgatcactgaaaaataaatccccatgttgatatagttgtttaatgaaaaatgcgcctaattccgtttcattattaaagaaatattgtttgttagcatagtaaacaataattttttgtacttctggtttgccatccttgtaagaaaaatacttttctaattttgtgtcaccttctggattatagaaaaattcacataatgtttgttgtttatcaacaagaatcctactacaacttaaaaagccacgcacatcataaaaatcacgttttacttttcgtctttgactatcaaaatgatttacataatctaatatacgatatttaggatcttgaaaatgggcatacattaagaaacgctcttgatcatatattctaaagtcatgactattttcaacatgttttaaagtataatgacattcatcagtccaatacgacaaccagtcaaatggttcattgcgttctaaatatgttgcttcttggaagaaatcatacatattaatatagtcagaactagtaatataattttgggcatttctatataaatatctattccatgacagaaatacacattgcgctggtcttcccatttctttaaataaatttaaacgattaataattgctttctctatcccagttaaattaacacctaaactattacctacaaaataattcatttacaacaccacttatatctattttttataattatatcacataatatttaattacttcttttaactggaagatgtgtttatttataaaacaacaaattttgatatttataatgatagtagttattcaatcaactacgaccaatatatcattgtagagcttaggatattgatttatgactcaggcacatcaaatgagaagatttataaaagagatatacaactctagaaggtataataaaaacgcgcaactaatgttacgcgtttgaattaatcatatgatattatttgcgatactttaatttagcgaaagcatcatgttgatggatagactcttcattacgacattcgatatcgaaaccgtctaaccaatcaaattcaactaagtccgcggcaattaaacgaattaagtcttcgacaaaacgtggattttcatatgcacgctctgtcacacgtttttcatcaggacgttttaaaatagggtatagaattgaacttgcattagcttccattgcatctaaaattttatttttatagtcatcaactatgtcttgatctttattaatatatgttttaacagtgacaacaccacgttggttgtgcgctgaatactcacttatttcttttgaacaagggcatagcgttgtgacagttgcttcaatagtaagttctttacgtgtaactttatcaccgtcaattgctaatccataagtgacatcggcattaccaactgctttaatatttgtggttggactatagcgatcaaagaaccatttcccagaaacatcaacgcctgccgcattttgtttcatattcgtttgtaaagtgcgtaacacctgataaagtgtattaaattcaagttcaataccattatcatagtgcttttcaacactttcgattatacggctcatattaatacctttttcgtcttttgttaaacttgttgaaaaactaaatgtgccagctgtttgatactggtcaacaagtacagggtacactaagtttttaataccaacttcttctatttcaaataaaaaatctttatgtgtactttgtaaatctgtcatttcgttcttagtagtaggtttcgtgccttcaataggatctacggaaccaaagtgtttccaacgaccttctcgtgtcgataaatcaaattcagtcatttttttcctccgttaagatttaaagtgatatgtccaatatggttcgactgttaaaaagctgtgttgtttaccatcgatttcaggacttgctaattgttttaaaaatggacctgtttgagaagcatgtgcttcaaatgccttaattttaagttctttaaaatctgtaatatcattttgaatatcaggttctccaagagcttcggttgcatcattactgaacgcaactaaagttaaacgagggcgttcttctttaggcatgcgttcaaccgttcgaattacagcgtctgctgttgcttcgtgatcaggatgtactgcatatccaggataaaatgaaataatcaatgatggatttgtatcatcgattaaagatttaatcataccatctatatgttcatagggttcaaattcgacagttttgtcacgtaaacccatttttcttaaatcagtaataccgataactttacaagcttcttctagttcacgctcacgaatacttggtaatgattcgcgtgttgcaaatgggggattacctaaatttctgcccatttgtcctagggttaaacatgcatatgttacaggtatgcctttttggatataatttgctaatgtgcctgcagatgagaaggtttcatcatcaggatgtggaaatattactaatacatgtctttcgtcagtcatgttgatgcctcctctataaattaaatggtcgctcactaatttgaagtgctgcagcgagttgaccttcgtaattaaaacctgcaattaaaaattcatcatgctcattgacctcaaaatgcgttagaccttgtacataaacccaaccaccatttgatagtttaagaccaatgcgataaggttctttattaccaccttttagttgtgcatgcgtatatgttatttgtatgtttcttaaaaaagtaccagcattaaaaacacgttgatcgaaatggttcgcataggccccatttgtcgtttcaacatgcagatacacaggtttatgttcaaaagaagcaagtaaatctataacttcttgttctttaattggttccaacacgttcactccttacactatcaatgtgtttatctttctattttactaaaaactattcgataattgtatacgattgctcaattatttataaattaattttcatgaagggtaattactcaggattacgtaatcatacagcattagttttttacttttaaaaatcaaaaatttgttggaatttgaaaagtgttaaacattaaaaatgatgctatattaatggtgtatgaatgaattcataagtttttaaaatgtattaaatttgtggaggcatgtaaacaatgaaagtattaaacttaggatcgaaaaaacaagcatcattctatgttgcatgtgagttatataaagagatggcatttaatcagcactgtaaactaggtttagcaactggtggtacaatgacagatttgtatgaacaacttgttaagttattaaataaaaatcagttaaacgtagacaatgtatccacgtttaatttagacgaatatgtaggtttaaccgcatcacatccgcaaagttatcactattatatggatgacatgcttttcaaacaatatccttattttaatagaaagaacattcatattccaaatggagatgccgatgatatgaatgcggaagcgtcaaaatataatgacgttttagaacaacaaggtcaacgtgatattcaaattttaggtattggtgaaaatggtcatattggatttaatgaacctggtacgccgtttgatagcgttactcatatcgttgatttgactgaaagtactattaaggctaatagtcgatattttaaaaacgaagatgatgttccaaagcaagccatttcgatgggacttgctaatattcttcaagccaaacgtatcattttactcgcatttggtgaaaagaaacgtgctgctattacacatttattaaatcaggaaatttctgttgatgttccagccacattacttcacaaacacccgaatgttgagatatatttagacgacgaagcttgcccgaaaaatgttgcgaaaattcatgtcgatgaaatggattgattgcaatgtttaattaagaaatgcctcgggaaaggttccaatagaaagataaaaagcattggaaggatgatttttagtggaattacaattagcaattgatttattaaacaaagaagacgcggctgagttagcaaataaagtaaaagattatgtagatatcgtagaaatcggtacgccaatcatttacaacgaaggtttaccagcagttaaacatatggcagacaacattagtaatgtaaaagtattagcagacatgaaaattatagatgcagctgattatgaagttagccaagcaattaaatttggcgcggatgtaattacaatactaggtgttgcagaagatgcatcaattaaagcagctattgaagaagctcataaaaataataaacaattactagttgatatgattgctgttcaagatttagaaaaacgtgcaaaagaactagatgaaatgggtgctgattatattgcagtacacactggttatgatttacaagcagaagggcaatcaccattagaaagtttaagaaccgttaaatctgttattaaaaattctaaagttgcagtagcaggtggaattaaaccagatacaattaaagatattgtcgctgaaagtcctgatcttgttattgttggtggcggaatcgcaaatgcagatgatccagtagaagctgcaaaacaatgtcgcgctgcaatcgaaggtaagtaatatggctaaatttagtgactatcaattaattctagatgaattaaagatgactttgtcacatgttgaagcggatgagttttcaacttttgcatccaaaatactacatgctgaacatatatttgtagctggcaaaggacgttcaggattcgtggcgaatagttttgcaatgcgcttaaatcagctcggcaaacaggcacatgttgttggagaatcaacgacacctgcgattaagtcgaatgatgtatttgtaattatctctggttcaggttccacggaacatttaagattattagcagacaaagcaaaatcagtaggtgctgacatcgtattaattactacaaataaagattctgcaataggcaatctagctgggacgaacatcgttttgcctgcaggtacaaaatatgatgaacaaggctcggcacaaccattaggaagtttgtttgaacaagcatctcaattatttttagatagtgttgtaatgggattgatgactgaaatgaatgttacggaacaaacgatgcaacaaaatcatgctaatttagaataaaataaagatagtcgataatatgatgcctaggcagaaatattatcgattatttttttatttaaataataaattatagtataatatcaataataaacgaataggggtgttaatattgaagtttgacaattatatttttgattttgatggtacgttggcagacacgaaaaaatgtggtgaagtagcaacacaaagtgcatttaaagcatgtggcttaacggaaccatcatctaaagaaataacgcattatatgggaatacctattgaagaatcatttttaaaattagcagaccgaccattagatgaagcagcattagcaaagttaatcgatacatttagacatacatatcaatctattgaaaaggactatatttatgaatttgcgggtataactgaagccattacaagtttgtataaccaagggaaaaaacttttcgtggtgtctagtaagaagagtgatgtattagaaagaaatttatcggctattggattaaatcacttgattaccgaagctgttggatccgatcaagtaagtgcatataaaccaaatcctgaaggcatacacacaattgtgcaacgctacaatttaaatagccaacaaacggtgtatattggtgattcaacgtttgatgttgagatggcacaacgtgctggtatgcaatctgcagctgtcacttggggtgcacatgatgcaaggtcattacttcattcaaatccggattttattattaatgatccatcagaaattaataccgtattataaaacttgttaaaacagagaataccatggttaaaatgcatattcataaatattagattatacttagaaatatttcgctttagattaggaatttaaaataaatatttattaaacattatgaatttttaaagagtaatgtctgactcgttgataatttatttttgtaaaaataaattaaagtaatgacaaagttattgaagtaaattgagtataaacatttaaatacgatgtcgaaaatggcgatagcatatcacttacatgaagttatgtgctatcgctatttttagttataattccaaaaagttaatcgttcgatgatttaagaattattattgtttaattcaaatgtatgagggtataaaatcattgaatttaattcgataaagcgaaatttttgaacaaacatacttttgtatttatataaaagtttaaattcttataaatttgacaaaactaattaactccgtataattatgaaacatacaagagggagtgtatgaattcatggattttaataaagagaatattaacatggtggatgcaaagaaagctaaaaaaaccgttgttgcaaccggtatcggtaatgcaatggaatggttcgattttggtgtctatgcatatacaactgcgtacattggagcgaacttcttctctccagtagagaatgcagacattcgacaaatgttgactttcgcagcattagccattgcgtttttattaagaccaattggtggtgtcgtatttggtattattggtgacaaatatggacgtaaagttgtattaacatctacaattattttaatggcattttcaacattaaccattggattattgccaagctatgatcaaattggactttgggcaccaatactattattgcttgcaagagtactacaagggttttcaacaggtggagagtatgcgggggcaatgacatatgttgccgaatcatctccagataagcgtcgtaactcattaggtagtggactagaaattgggacattatcaggttacatagctgcttcaattatgattgctgtattaacattctttttaacagatgaacaaatggcatcatttggttggagaatcccattcttactcggtttattcctaggattattcggcttatatttacgtcgtaagctggaagaatcaccagttttcgaaaatgatgttgcaacacaaccagaaagagataacattaactttttacaaatcatcagattttattacaaagatatatttgtatgttttgtagctgttgtattcttcaatgttacaaactatatggtaactgcatatttaccaacctatttagaacaagttattaaattagatgcaacgacaacaagtgtattaattacttgtgtcatggcaataatgattccattagcattaatgtttggtaagttagcggataaaataggtgaaaagaaagtatttctaattggtactggtgggctaacattattcagtatcatcgcatttatgttattacattcacaatcatttgttgtaatagtaatcggtatatttatattaggatttttcttatcaacttacgaagcgacaatgccagggtcgttaccaacgatgttttacagtcatataagatatcgaactttatcagtaacatttaatatctctgtttcgatatttggtggtacgacgccattagttgcaacatggttagttacgaaaactggagatccattagcacctgcgtattatttaacagcaatcagtgttattggctttttagttattacattcttacatttaagtacagcaggaaaatctctaaaaggttcgtatccaaatgtagataacgagcaagatagagcttattatgcagaacatccaaaagaagcattatggtgggttaaagaacgtaagaattagagattttaataaaaagtataaatcaatcgtatataagcactttaaagctagtaggttctgctaactttaaagtgctttttaaattgagaactgtaattagccgtaataaagtttttgtatatacataaacccccactgcaatgattatcgcaatgggggaaagaggggacttaaagcatatgtttagctttgaatacttaaaattctcttgctattgaaatgttaggatgtaaatatgtcttagagtattttgtccaacgcaattaatattgagactctaaccttcaatattattatagagaacacaaacttaaatagattgggtgacttatttgtgtcagttattgcgattgcgataacttcttttctctatatacatatagtaacgtcttatctaataaaaaacatggtactacagtatcaaatttatctagggcttaagtttgatttttataataggcaggtttacctgataaaaatacttattcattatataatgttaacaatatgtattttaaagtttacattgagtgagggatattgatgaacgtaattttagaacagttgaaaacacatactcaaaataaacctaatgacatagcattacatatcgatgatgaaacaattacatatagtcaactaaatgcccgcatcactagcgcagttgaatctttgcagaaatattcacttaaccctgtcgttgctattaatatgaaatcaccggtgcaaagtattatttgttatttagctttgcatcgtttacataaagtgcctatgatgatggaaggtaaatggcaaagtactatacatcgtcaattgattgaaaaatatggtattaaagatgtaattggagatacaggtctcatgcagaatatagactcaccgatgtttattgattcaacgcaattacagcactaccccaatttattacatattggttttacttcagggacaactggactgccaaaagcatattatcgtgatgaagattcatggttggcttcttttgaagttaatgaaatgttgatgttaaaaaatgaaaatgcaatagcagcccctggaccactatcgcactcgttaacattatatgcgttattgtttgctttaagttccggtcgtacttttataggacagaccacttttcatcctgaaaagttacttaatcaatgtcataaaatatcatcatacaaagttgctatgtttcttgttccaacgatgattaaatcattattgttagtttacaacaatgaacatacaatccaatcattttttagcagtggagataagctgcattcttctatttttaaaaagataaaaaatcaagcaaatgacataaatttgattgaattttttggtacatcggaaaccagttttatcagctataacttgaatcagcaagcaccagttgaatcagtaggtgtgctatttccaaatgtggaattgaaaacaacgaatcacgatcacaatggtataggaactatttgtataaaaagtaatatgatgtttagtggctatgtaagtgaacaatgtataaataatgatgaatggtttgttactaatgataatggctatgtaaaagagcagtatttatatttaacgggacgtcaacaggatatgttaattattggtggtcaaaatatatatccagcacatgttgaacgccttttaacgcaatcttcgagcattgatgaagcaattatcatcggtattccaaatgagcgttttggtcaaataggcgtattgctttattctggtgatgtgacacttacacataaaaatgtaaaacaatttttaaaaaagaaagtgaaacgctatgaaattccatcgatgattcatcatgtagaaaagatgtattacactgcaagtggtaaaattgctagagaaaaaatgatgtcgatgtatttgagaggtgaattataatatgaatcaagcagtcatagttgcagctaaacgaactgcatttgggaaatatggtggcactttaaaacatttagagccagaacaattgcttaaacctttattccaacattttaaagagaagtatccagaggtaatatctaaaatagatgatgtagttttaggtaatgttgttgggaatggtggcaatattgcaagaaaagcattgcttgaagcggggcttaaagattcaatacctggcgtcacaatcgatcggcaatgtgggtctggacttgaaagtgttcaatatgcatgtcgcatgatccaagccggagctggcaaggtatatattgcaggtggtgttgaaagtacaagtcgagcaccttggaaaatcaaacgaccgcattctgtgtacgaaacagcattacctgagttttatgagcgtgcatcatttgcacctgaaatgagcgacccatcaatgattcaaggtgctgaaaatgtggccaagatgtatgatgtttcaagagaattacaagatgaatttgcttatcgaagtcatcaattgacagcggaaaatgtaaaaaatggaaatatttctcaggaaatattacctataaccgttaaaggagaaatattcaacactgatgaaagtctaaaatcacatattccgaaagataactttggccgatttaagcccgtgatcaaaggtgggaccgttaccgctgcgaatagttgtatgaaaaatgatggtgcagttttattgcttattatggaaaaagatatggcatacgaattaggtttcgagcatggtttattatttaaagatggtgttacggtaggtgttgattctaattttcctggcattggtccagtaccagccatttccaacttactaaaaagaaatcaattaacgatagaaaatattgaagtcattgaaattaacgaagcgttcagtgcacaggtagttgcctgccaacaagctttaaatatttcaaatacgcaattaaatatatggggtggtgcattagcatcaggtcatccatacggtgcaagcggtgcccaattagtgactcgattattttatatgtttgacaaagagactatgattgcatctatggggatagggggaggtctaggaaatgcagcattatttactcgattctaaccagcgattaaatgtgtcattttctaaggatagtgtggctgcatattatcagtgttttaaccaaccttatagaaaagaagtaccaccattaatgtgtgcgtcattatggccaaaatttgatttatttaaaaaatatgcaaatagcgaactgattttaacaaaatcagcaattaatcaaactcaaaagatagaagtagacacaatatatgtagggcatttagaagatattgaatgccgacagactcgcaatatcacacgttatacaatggctttaacattaactaaaaatgatcaacatgtcataacggttacacaaacttttattaaggcgatgaagtagagatgaagtttaatgagatatggataaatgaatatttggcgctcgtaaatgatgataatccaatacataatgagattgtgccaggacaattagtgagtcaaatgatgctgatggctatgtcattagagacaaaccagtgtcaaattaactacgttaaacctattttaataaatgaaaatatcgaattcattgaacaacacgaacacgaaattatagcaattaatgacgatggagagattaaaataaaaatttctttgagcacaaaaaaataaccgatattagctgcatgaacgcatattaattaggagatgaaaggacagctaatatcagttatgtattgttattattattgggaacagagatgaatataggttacgtttctttctttgcacggggatgcattaatctaaaataataataacaactatatcaatgtttaataaattctggattattggaacgattagtcaatttaactaactttcatatgatctatatcgtcttgtaataaagagagcaatttgaatatttcagtatcactaaatgaatcgtcacatttaattgaaacatgctgaaacgttttggttataatttcataaactggtgcgccttcatggtgatactgtcgataaataatcataacctatattacctcctttgctactctatggttatattataaataacatttttatgtgtgacatcaaccttaagtatcaactttttatcagacatagaacgtatgatttactaagactatttatgtataaaagttctaaataaatatatatttatagagtcgcctggcagtcatttgggaaatataacatatatgattagagaggcatctatcgcaaaagaatgataatgatagaggtattgagcatatagatgagtttaagttcatcttgaaaataaagggttatttagtcatagatgtagatgtataggaaatatttgtatgtattgttcgatatgtatgaaattttcaataaaagctaataacgcttatatgtaactttcaaatttaaattatatacagagcatgatgattataaaaaaataaccacatcacataaattgagttcatacccaatttaagtggtgtggctaataatgttgatttatagatgaaccgcctaatcgttaaacctctgttacttcaacatcgatatgttcaatacggttgtatgcaccgtgatccacaggaccaacaaaatcattcattttccaaccgtttttaatagcagaagcgacgaaagctttcgcgctaatcacagcttctttcggtgacttaccgttagctaaatatgcagttgttgccgcagcaaatgtacaaccagcaccatggttataactttgttggaacatgtctgttgttagttgataaaatgtttgaccatcatagtataagtcatacgatttatcttgatctaaagctttgccacctttaatgatgacatgctgtgcgcctttatcaaagataattgttgcagcctttttcatatcttcaattgaatttaatttacctaatcctgataattgacccgcttcaaataagtttggtgtcactaccgttgctttaggtagtaaatatttaatcatcgcctcagtatttccaggattaagcacttcatcttcgcctttacaaaccatgacaggatctactacaaaatattgtgcattagatgcctcatatacttctccagcacgtttgattatctcctcagtacctaacatacctgttttaatagcatcaggtccgattgataaagccgtttcaagttgtttttcaaatacatccattggtaatggtgtaacatcgtgtgaccatgtatctttatccatagtaacgatggcagttaaagcgaccatgccatacgtatctaattcttggaacgttttcaaatctgcttgcatacctgcgccagcacttgtgtcagaaccggcaattgttaaaactttctttaaagccattgagcttcactcctacataataatattgtattcatcatatcatttttaacctaattgaaaaatattaagcattcaatatttgatgattgttgaaatgaatcattcatactattgtaacttttgaaaatgtcattcactttagataagtgtgatatgttaaaatatgtcctgaggtgagattgaatggaatggtcgcaaatttttcatgacataacaacgaaacatgactttaaagctatgcatgattttttagaaaaagaatattcgactgcaatcgtataccctgatagggaaaatatatatcaagcgtttgatttaacaccgtttgaaaatatcaaagttgttatattaggacaagacccgtatcatggtccaaaccaagcacatggattagcattttcagtgcaacctaacgcaaaattccctccatctttacgtaatatgtataaagaattagcagatgatattggatgcgttagacaaacaccgcatttacaagattgggcaagagaaggcgtcttgttattgaatacagttttaaccgtaagacagggtgaagcaaattctcatcgtgatattggttgggaaacatttactgatgaaattattaaagcagtgtctgattataaagaacatgttgtctttattttgtgggggaaacctgcacagcaaaaaataaagcttatcgatacatctaaacattgtattataaaatcagtgcatcctagtccactgtctgcatatagaggattctttggatcaaaaccgtattccaaagcgaatgcctatttagagtcagtaggaaaatcaccaattaattggtgtgaaagtgaggcgtagatgttgaatagagaaactttaatagcacgaattgagcaagaattagtacaagcagagcaggcacagcatgaccatgactttgaaaaacatatgtatgccatacatatattaacatctttatatgcttcaacatcaaatacaccacatattggtgaacaacaaatgaatcgtcgtattgctaaccataatcaaatgccacaatcacaaataacgcagccaactcatcaagtgacagttgctgaaattgaagcgatgggtggtaaagtaaatacgcattcagcacatcatcataataagtcatattcacaaccttcaaaccaacaacaaagattagcgacagatgatgacattggcaatggtgaatccatatttgatttttaaaaagcaacaatgaaacataattacttaatagcttgttaagtatgtaggttaataatcaagacgcatatacttttattcgagtgttcggatttaaacatttattaatactgaattatataaggagaggtagcaatgaaattatttattattttaggtgcattaaacgcgatgatggctgtcggtacaggtgcatttggtgcgcatggtttacaaggaaaaataagtgatcactatttatcagtatgggaaaaagcaacgacgtatcaaatgtaccatggcttagcattattaattataggtgtaattagtggtacaacttcaatcaatgttaactgggctggctggttaatatttgctggtattattttctttagtggatcattatatattttagtattaactcaaattaaagttttaggtgcgattacgccaattggtggcgtattgttcatcattggatggataatgttaatcattgcgacattcaaatttgctggttaaattttaaaactttagattacctatgtaactaaacattaaatttttaataaaaataatcaagaaaaagagttacaaactcatcttttgggtatagaataccttcgaggtgagtttttatttatggaaaaaaagaataagcaaatagatagaggcgatttaaaacaaaacctatctgaaaagtttgtatgggcgattgcatatggttcatgtatcggatggggcgcattcatcttaccaggagactggattaagcagtcaggtccgattgcagcatcaattggtatagttattggtgcattattaatgatattaattgcggttagttatggcgcattagtagagagatttccagtatcagggggcgcgtttgcctttagtttcttaagtttcggcagatatgtgagtttcttctcatcatggtttttaacttttggttatgtctgtgtcgttgctttaaatgcgaccgcattcagtttactagttaaattcttattgccagatgtcttaaataatgggaaactatacaccattgcgggctgggacgtttatattacggaaatcattattgcgaccgtattactacttgtattcatgctagtaacgattcgtggcgcaagtgtatctggatcattacaatattatttctgtgtggcgatggtaatcgtcgtattattgatgttctttggttcattctttggtaataattttgcacttgaaaatttacaaccgttagctgaacctagcaaaggatggttagtgtctattgtggttattgtatccgtggcaccatgggcatatgttggatttgataatattccacaaacagcagaagagtttaactttgcaccaaacaagacatttaagcttatcgtgtacagtttattagcagcatcattaacttatgttgtcatgattttatacactggttggttatcaacaagtcatcaaagtttaaatgggcagttgtggttaacaggtgctgttacacaaacagcatttggttatattggattaggtgtattagcaattgcaattatgatgggtatatttactggtttaaatggattcttgatgagttcaagtcgcttgttattttctatgggacgttcaggtattatgccaacaatgtttagtaaattacatagtaaatacaaaacaccatatgtcgcaatcatattcctagtaggagtgtcgttaattgcaccttggctaggaagaactgcattgacttggattgtagatatgtcatctactggtgtatccattgcctactttattacatgtttgtctgcagcgaaattattcagttataacaaacaaagtaatacgtatgcaccggtttacaaaacgtttgctattatcggctcatttgtatcattcattttcttagcgttgttattagtgccaggttctcctgcagcactgactgcaccgtcttatattgcattacttggatggttaatcatcggtttaatattctttgtgattcgatatcctaaattgaaaaatatggataatgatgaattaagtcgcttgattttaaatagaagtgaaaatgaagttgatgatatgattgaagaacctgaaaaagaaaaaactaaataataaaagaatcgcacaataaaccttcttcattcggaggcgtatcgtgcgattttttgtattataaattgacatttaagacgaggcagctgaaccttatatataattgctaagagttagggctgagccatttctaacaaatatttataatcgtttaaaagatttcacgaacccagaaacaattaatttggaaatttggtcggcgaataataaacctaatgcgatggcgcctgcaataagtgtaacctctagcatggtattgattgctgtactgaaatttaataagactaaattttttgtagcatcgtatgctaagccaccaggtactaatggaatgatacccgttaccataaaaatgatggcaggttctttttgtttacgagccatataatgacttaacaagcctaatgctaaactaccaaagaaactagagtatatagtgtgcacattaaagccgttgaagaataaggtgtaaaccatccatccacacgtaccaacgaaaccacatgatagatataattttctaggtgcatcaaaaatgacgcagaagaacattgaagctaaaaagctaaagataaagtttaagatccaaaacatagtctgatactcctatactaaaattaatacgctaccaacgccagcaccgatgccaaacgcagtaaccaatgcttctaatgatttcgttgtgaacatcaacatgtgtccaccaaataaatcttgtattgcgtttgttattaatacaccaggaacaataggcatgactgccgcaatgataatagttgccaagtcacctgttggaataagtgtatgtccaataacggcgataatcccaataactaatgaaccaatgaattctgggataaactgtgcgtgtaacttacgatctaaaatctcagtgactaggtatcctagactacctgctaatatcgcagttaaaacatcaatcaatctaccaccttgtaaatataagaaactcattgcaatcattgctgcagcaaaacctttaaagggaagactgctgtcacgcttagcaacatatattttttcaagttgcgtttttgcttcggctaaagaaatttcattgtttgtaatttgacgcgaaattttattagcttgagaaatttttattaagtttgtatctcgagaggtaattctaaatattctaggaaacgattccgaatgtaacgtaaactggatgacagtgtttgtaacaaagctgttactttcactgtaaccaagtttttttgcaatacgtgtcatggtatcttctacacgcgtaccttctgcaccagattctaatagtatgcgagcagcaagcatgacaacgtctttgataagtacctcttgtttgtattcttctgaatttatgtccatttcatcaccattgtttataagaatttaatactcattatagtttatacactataaaataaccacatgagctttttgataagttgttattgattttaaaaaactaatatttgatactattgtaataataatcatcggaatttttagtagttaaaattctcttgaagtataaaaaggaaaaattattgaaaaaaattcgacaaaaatatgtttcaaatatttcaaataggttaaaataatattagttaaccattacaaaaattgtatagagtagcgactgtataatttctattgaggttaacgtttatatgtagtgatagtagttaaagttctcccaaggaagactactcgggtacactttgctatgagcaaagtgtactttgttattgataatacattagcacatatatataagtttaaacatacagatttcaactatttaccaaatcacgtcttatgtatacgggaatatactgaagataaacgaaaaattccaagcttaaaccgataagcttggaatttttttattaatttataaacgtaccaatgtattaagaaatcgcaaagaattgatcgaattcgtttgtgttaataatatgtcctacaaagaaactaccgaattcaccgtatcgtgctgttgtttcatcaaagcgcatttcgtatacaatttttttgaattgtaatacgtcatctgagaacaatgttacgccccattcgaaatcatcaaaccctacagaaccagtaataaattgtttgattttgccagcatattttctaccaatcataccatggtcatacattaatttttggcgttcttccatagttaacatgtaccagttataagtttcattacgacgtttgttcattggatagaaacaaatataatcagaatgtggtaattctgggtataatcttgctttgatatgagggttctcataaggatcttcatcagatttaccagctaaataattgctcaattcaatgactgatacatatgaatatgtagggattaggaagtcagcaatgcgcaatttgttaaattcattttcaatatgatttaaagacttcatttcaggacgtaagaaccataataacaaatctgctttttgaccagttatattataaatagcttgatcaccagattttgatgatcttacagttgctgtattttctaaaaatgattgaaattcagtgacaagtgcatcgcgttcgtcctttggaactatacgtaatgatgcccaatcaactgcataaaataaatgtagactataccaaccatctaatgtttcggctgcttgactcatgtttatcgctccttttcaaaaatcatcagttctttataaattttatcataaagcaaaggggtaacgataaaattatgattacaaattggtgacgtggcattatgaaataaaatggcgtataattataccgtgaatgattaataagatttatattacaggaggacattatggctgatttattaaatgtattaaaagacaaactttctggtaaaaacgttaaaatcgtattacctgaaggagaggacgaacgtgttctaacagctgcaacacaattacaagcaacagattatgttacaccaatcgtgttaggtgatgagactaaggttcaatctttagcgcaaaaacttgatcttgatatttctaatattgaattaattaatcctgcgacaagtgaattgaaagctgaattagttcaatcatttgttgaacgacgtaaaggtaaagcgactgaagaacaagcacaagaattattaaacaatgtgaactacttcggtacaatgcttgtttatgctggtaaagcagatggtttagttagtggtgcagcacattcaacaggcgacactgtgcgtccagctttacaaatcatcaaaacgaaaccaggtgtatcaagaacatcaggtatcttctttatgattaaaggtgatgaacaatacatctttggtgattgtgcaatcaatccagaacttgattcacaaggacttgcagaaattgcagtagaaagtgcaaaatcagcattaagctttggcatggatccaaaagttgcaatgttaagcttttcaacaaaagggtctgctaaatcagacgacgtgacaaaagttcaagaagctgtcaaattagcacaacaaaaagctgaagaagaaaaattagaagcaatcattgatggcgaattccaatttgatgctgcgattgtaccaggtgttgctgagaaaaaagcgccaggtgctaaattacaaggtgatgcaaatgtctttgtattcccaagtttagaagctggtaatattggttacaaaattgcacaacgtttaggtggatatgatgcagttggtccagtattacaaggtttaaattctccagtaaatgacttatcacgtggctgctcaattgaagatgtatacaatctttcaattattacagcagcgcaagccttacaataacgatggatttagcgagtaaatattttaatggcgtcaactggcgatatatcgatcattcttctggattagaacctatgcaatctttcgcattcgatgatacattttgcgaaagtgtgggcaaagatatatcagataatgttgtgcgtacttggattcatcaacatactgttattcttggtattcatgattcaagattgccgtttttaaaagatggcattgattatttaacgaatgagattggttataatgccattgttagaaattctggtggcttaggtgtcgttctagatcaaggtgtattaaatatatcgctgatgttcaaaggacaaacagaaacaacgattgatgaagcgtttactgtgatgtacctcttaattagcaaaatgttcgaaaatgagaatgttgatattgatacgatggaaattgaacattcttattgcccaggaaaatttgacttaagtatcgatggtaagaaatttgcaggcatatcgcaacgaagagttagaggcggtattgctgtacaaatttatctttgtgttgaaggctctggttcagaacgtgcattgatgatgcaaacattttatgaacatgctttaaaaggtgaagtgactaaatttaaatatcctgaaattgaaccatcttgtatggcctcattagagacattgcttaacaaaacgattactgttcaagatgtaatgtttttactattatatgcaatcaaagatcttggcggtgtattaaatatgacgccaattactcaagaagaatggcaaagatacgatacgtattttgataaaatgattgaaagaaacaagaaaatgatagatcaaatgcaatagttaaatatttaacagcccctttcaagttatcgtttggggctgttatttttgaaagtatccataaaaagcataaatatgttattgacctaatatttaaattgaacatcattaaattaaaagtaatgatatgatggaaataataaatttaataagaaaatttcatgttttacgtattaaatagattgagaatagggtatatataatgcgtatgactatgaaagaaacgaccttctattgaaatgttctaatactttagtagtaaatctatatattccaattattatttgtagtattatagttagggtggaaaattataaattgtagggctattttataaaaagataaagaatctgaaatatcactcgataagatttaaactttgaagtaaacgaaagttagttttatactaatcaagttaagtcaaatataaattcaaaataaagattatacataatatgaataatgtgagataaagactgcaatgaaatttaacgagaatgcgtatgcaacttagaatatgatgtcttttactaataaataaaaataatgaatcaagtataggataaatataaaaggtgatattgacatgacaagaaaaggatatggggaatcgacaggtaagattattttaataggagaacatgctgttacatttggagagcctgctattgcagtaccgtttaacgcaggtaaaatcaaagttttaatagaagccttagagagcgggaactattcgtctattaaaagcgatgtttacgatggtatgttatatgatgcgcctgaccatcttaagtctttggtgaaccgttttgtagaattaaataatattacagagccgctagcagtaacgatccaaacgaatttaccaccatcacgtggattaggatcgagtgcagctgtcgcggttgcttttgttcgtgcaagttatgattttttagggaaatcattaacgaaagaagaactcattgaaaaggctaattgggcagagcaaattgcacatggtaaaccaagtggtattgatacgcaaacgattgtatcaggcaaaccagtttggttccaaaaaggtcatgctgaaacgttgaaaacgttaagtttagacggctatatggttgttatagatactggtgtgaaaggttcaacaagacaagcagtagaagatgttcataaactttgtgaggaccctcagtacatgtcacatgtaaaacatatcggtaagttagttttacgtgcgagtgatgtgattgaacatcataactttgaagccttagcggatatttttaatgaatgtcatgcggatttaaaggcgttgacagttagtcatgataaaatagaacaattaatgaaaattggtaaagaaaatggtgcgattgctggaaaacttactggcgctggtcgtggtggaagtatgttattgcttgccaaagatttaccaacagcgaaaaatattgtaaaagctgtagaaaaagctggtgcagcacatacttggattgagaatttaggaggttaatgcgttgattaaaagtggcaaagcacgtgcacatacgaatattgcacttataaaatattggggtaaaaaagatgaagcactaatcattccaatgaataatagcatatctgttacattagaaaaattttacactgaaacgaaagtcacttttaacgaccagttaacacaggatcaattttggttgaatggtgaaaaggttagtggcaaagaattagagaaaatttcaaaatatatggatattgtcagaaatagagctggcatcgattggtatgcagaaattgaaagcgacaattttgtaccaacagcagcagggttggcttcatcggcaagcgcatatgcagctttagcagcagcttgtaatcaagcgctagacatgcagctgtcagataaggatttatcgagattggcgcgaattggttcgggttctgcgtcgcgtagtatttatggtggatttgcagaatgggaaaaagggtatagtgatgagacgtcatatgccgttccacttgaatcgaatcattttgaagatgaccttgccatgatatttgttgtgattaatcaacattctaaaaaggtacctagtcgatatggtatgtcattgacacgaaacacatcaaggttttatcaatattggttagatcatattgatgaagatttagctgaagcaaaagcagcgattcaagacaaagattttaaacgccttggtgaagtaattgaagaaaatggtttgcgtatgcatgccacgaatctaggatcaacaccgccgttcacatatcttgtgcaagaaagttatgatgtcatggcgcttgttcacgaatgccgagaagcggggtatccgtgttattttacaatggatgcgggacctaatgtgaaaatacttgtagaaaagaaaaacaagcaacagattatagataaattattaacacagtttgataataaccaaattattgatagtgacattattgccacaggaattgaaataattgagtaaggaagagataaaatgattcaggtcaaagcacccggaaaactttatattgctggagaatatgctgtaacagaaccaggatataaatctgtacttattgcgttagatcgttttgtaactgctactattgaagaaacagaccaatataaaggtaccattcattcaaaagcattacatcataacccagttacatttagtagagatgaagatagtattgtcatttcagatccacatgcagcaaaacaattaaattatgtggtcacagctattgaaatatttgaacaatacgcgaaaagttgcgatatagcgatgaagcattttcatctgactattgatagtaatttagatgattcaaatggtcataaatatggattaggttcaagtgcagcagtacttgtgtcagttataaaagtattaaatgaattttatgatatgaagttatctaatttatacatttataaactagcagtgattgcaaatatgaagttacaaagtttaagttcatgcggagatattgctgtgagtgtatatagtggatggctagcgtatagtacttttgatcatgaatgggttaagcatcaaattgaagatactacggttgaagaagttttaatcaaaaactggcctggattgcacatcgaaccattacaagcacctgaaaatatggaagtacttatcggttggactggctcaccggcgtcatcaccacactttgttagcgaagtgaaacgtttgaaatcagatccttcattttacggtgacttcttagaagattcacatcgttgtgttgaaaaacttattcatgcttttaaaacaaataacattaaaggtgtgcaaaagatggtgcgtcagaatcgtacaattattcaacgtatggataaagaagctacagttgatatagaaactgaaaagctaaaatatttgtgtgatattgctgaaaagtatcacggcgcatctaaaacatcaggcgctggtggtggagactgtggtattacaattatcaataaagatgtagataaagaaaaaatttatgatgaatggacaaaacatggtattaaaccattaaaatttaatatttatcatgggcaataaatgatttgataggggagcaatcatctaatttaattagaagataaatgctccattttttattgtcagccgtgttacgtatcttgaaaaaaatattaaaaagagtaaaatagatagagttaacgaaaaaattaatgaaatcgacgatatagatatgataaagaaaggtgggtagcaatatgaaaaatacattccttatttgtgatgaatgtcaggcagtcaatataagaacgttacaaaagaagttggaaaaattagatcccgatgctgaaatcgtgataggttgtcaatcttattgtggacctggacgccgaaaaacattcacttttgttaataaccgcccactggctgcgcttactgaagaagaattaatcgaaaaagtttctcaacaattaaagaaaccacgtgatcctgaagaagaagagcgtttaagaaaacgacatgaagaacgtaaacgtcgtaaagtagaacaagatagaaagcttaaagaaaaattagaaaagcgaaaagcacaacaataaagcctgatggcagcatcattcaatgcgtgccaccaggtttttatgttttgtctagaaattaaataaatcattaaatgattcggccatcgtaggatgcgtataaatattatctcgtaatacggtatatggaatgttttgatcaatcgcaagtttaattatattaattaattcttcagattgcttaccatataatgtagcacctaaaatcatattattttcattattaatgactactttaaataaacctcttggatcattgttaattttatgacgaggtatagcacttactaaaagttgatgttcagtgtaatcataatgttgagcggcagcttctttactagttaatccaacacgtgataatggtggatctataaatactgtataaggcacgctgcctctattgtcagtcgtacgtgactgattaccatataacgctgatttgataattcgataatcatctaaagatatatacgtaaattgaagtccgcctttaacatcacctgcagcataaatatgcggcacagttgtttgaagatgagcattgactttaatttcgcctctgtcgcctaattcgatatcagtattttctaaagctaaatccgtattcggtttgcgcccgatagccaaaagtactgcatcagcctcaaagttatcaacgttggtatggactgttgtatgatgattgtcagatgacaattcagtcgtttcaacatttgtatgcaatgcaatgcctttattttctaagtcagtaataccatatgcaacgacatcttgatcttcgcgtggcataaatgattcgccacgttctaatactgttaccttactacctaaattcgcaaacattgaagcaaattctaaggcgatataaccgccacctacaataacgaggtgcttaggttgatagctaatgtttaataaacctgtcgaatcgaagacgtgtttagcttgatcaaggcctttaatgttaggaatgacagaggtagcaccggtattaataatgatatgaggtgcagtaatactatcgacgatatcgtcatgttgatctaataaattcacttcagtattagatttaaactgcgctttaaaatccagtacatcaatgttgttatcgtctgctaataagtggtaatttttattgtttagcgcattgacaacatcgtttttacggttataacttgcttcaaaagatttgccttctaatccatcatgtacaagtgtcttcgaaggtatacatcctatgtttatacaagtgcctccatacattttcggagattgttcgataactgcgacgtgttgacctgttgatgcagcgtatttcgctaaagttttaccagctttcccaaatcctattacaattaaatcatatgttttcatgacataaatcctccttttgaatgtcttcaatgacatctttgattgtttttccattataaaaattaataatgatattctgttcgtcttgctgataatgtgacatggtagttgcaatattacgagcaatttgacagtgactgccttcgtcgccagtaaatagacgtgtgtggtgttctttctctaagacaaaatgtttatataatgttgctagagagacatcagcactttgatcatttgctaaataaccgccatctttacctcgtattgtgtcaatcatttttaaatcgacaagttgagtcgtcacgcgtcgtaattgaacaggatttaaacaagttaattctgctaatgaactactattgaatttttctgaatgatgcttagttaaaaaagctaatacatgcacggcaatgttaaattctaaattcaatgtttctcacctcataattgtaactgtattagttacaattaaaaatcattttgctcaatgtgtcaatacttatgtttgaaaagtgttgaattaggtgtggttattgtgatgatttattgtttgaaagttgatgcattaacggtgagattgcacaattgaaattttaattatgtatgaactgatagatatgaaatgaatattgaaaatgagagcaataaaattttgaatgatgatgttgtgtgattgtataaacttattcgtattttagatacgttttgatatttcgcatgatgaggaaatacttttaacaactgatgacatattttaatagtgaatatattttgagatattaatatatttaatgttaaggatgttgtcgcaataaaattaaaatattgaaagataatttttattgattaattgcgaatatacaaagacaccattatatccatatgctaaaataagaaaaaaggcgacatgttatctcaatttacctgcatctagactcctttacataagaaataatcatcgccgagttttaaaattttacaactttgtagatgtaaaaagcatttgattttaaatagtttgaaaatcatatatttttgaaaaaggagcatgccgatgagtattgacatgtatttagacagatctcgaaaccaagcttcaagtgtggggaatttgagtcaaacaatgaattcaaattatgatgcgttggaaaaagcaattactcaatttattaatgatgatgcgcttaaagggaaagcgtatacgtcagctaagcaattttttagtacggtgttaattccattatcaacaagtatgaaaacattgagtgatttaacgaagcaagcttgcgataattttgtgtcacgttatacgagtgaggttgatagcatatctttaaaagaatcagagcttgaagaagatatcagatcattaagtcaacaaattacgcgatatgaaaatttgaataacaatttgaaaaagcatgcttccgataatcagcaagccatttcatcgaaccaacaaataatacgaacattaggtcaacaaaaacatgaattagaagagaagctacgcaaattgcgtgagtttaatcaaaaatcaccagaaatatttaaagaagttgaagaatttcaaaaaattgtccaacaaggacttacccaagcgcagaatttttggaacttttcaacaaatcaatttaatattccttcaggtaaagaacttgattgggccaaagcaagtcatgaaaaatatttgaaagttgctatggggaaaattgaacataaagcagagaaagaaactttaaataaagcagactttgctgttataaaggcatatgccaaagaacatccagaagacgatatcccgaaaagtatattgaaatatataaatgacaataaagacagtattaaaagagatataggattagatattacgtcaacacttttagagcaaggcggtataaatgcaagtaaattcggtgtatttatcaatacagcaggtggagtgaaaggcccagcaggtccaaattcatttgtggaagtcaaacgtacatcaggtaatgtgtttatagaaaatggtagtaaatttgcaaaaggcggaaaatacctaggtaaaggtgttgctggtgtaggatttggtataggtatgtatgatgaccttgcaaatgatgataaaacatttggagaggcgttgtcgcataatggtatgacgcttgcagctggatctgcagggacagcagttggagctggattagcgacttttgttttaggaagtaatccagtaggatgggtgattttagcaggtttggctatgagtacagtatttgcattaggaacagatttaatttatcaaaataatatttttggattaaaagataaagtagactgggtagggcataaaatcgataatagtatagatgttgttaaaaaaactacagaaaaatccatggatagtgttgggaatgctgttagtgaagctaaaaatattattagcaatcatataaatccaatgaaatgggcgtggtgagttttgctttttaatattaaggttattaataaaaatccgagatataaagtcgttcaatataatgatgagtatttgttaattgatttagtaagcacttggcttgtatacttttttccttttattaattggttcattcccaaaaggtatgcaaaacttagtgagaaggaacttgaaaatttaaatgttgataaacaaaataaaaataatattttctggccagttactggtagttcgtttttatttgtagttattttacggaaatatgtacatacgtttgaagttcaattagataataagattttaatatctttatgttttataggatttataggtattgcagcattttacatttacttaaataaaaagcttaaactaaagatatatgatgataatctagataatgaaaatagggttatattagtgcctacttttaaagatggaagttttatagttttcacatatctattattaggaggttgttctatattatttttaatatggctaatgactataaaacctcaaaatctactggtatttattatgtggattattattacaatttttttctttctaataagcatgggctcaattagtaataaaaaggtttatgccaaacttaaaaagcaatagaaattactaaacttagattgtagttcgtaagttaagtaataaacaggaaaatagtatgttactaaaatacaaaacacttataaagtatctgaaagtgtattagatataaaaccaacgagacggaagtggagatattgctttgcgaggttagagttgtaaacaaaaatcccagatatagaattattaaatataaaaacgactatctgatgattgatttagtaagcacctggttagttttgttctttccgtttattaattggttaataccaaaaaaatatgtccaaatcagcagagaagattttgataatttaaatattgtcaaaccagttaaaaataaagctttatggccagctataggtagcatacttttatttggcactatgtttagagataaaatatatatacctgattctcatttagaaaaaaattgcgttattatcatttgttcggttttattattaagtattctagtgttttatatatatttaaatcagaaagtaaagttatctatctataatgatcggagtagcaatggaaaaattatgatttttccatcattcaagaatctttgctttgtactattttcttattttttctgtggtggattatcaatcatgttcttagatgttttgattagtttatctatccaaaatattatagtatttattgcttgggttattatgacaatgctatttttctttataaatatgtcttcaataatagacaaaaagattcatgttatatatttaaggtcatataaatattaattttgatacaaaagggcacaagtgttttgagaaacagaaacgataatatagctgtgtgaatttgttattaataggaagtgataattattgctttgtgaaaccgaaattatcaataaaaatccgaaatacagagttattaagtatgatgatgagtatttaatggtcgatgtaataagaacttggcttgtatacttttttccatttattaattggttcattccaaaaaggtgcgccaaaattagtagagaagagtatgaaaaactgaacactgttaagccagttaaaaataaaaatttttggcctgttgtaggaggaacaatcctactaggtgctacttccagaaagtacatacacttacttaatattcaattagaaaaaagatcggttatatttatatgcttcgttgtatttctatgtattttaatcttttttgtgcttctgaatcgaaaattaaaattgaaagttttcgataataaaaaagaagaacaaaaaataattttagtaccaacattaaaaaatgctgttcttatattatatggctatttgttgattggaggcatgtcaatattagctttaagcatgttgctgacattagaaaaccagaatttaataacttttatagcttggggtatggggttaatgttgtttttcttgatgaatataacactcattgtcaataaaacagtcaaagttataaaaaggtgaataaataactaattatattgtattggccgttcttcaaataaaaaataatttgaataaggtggaagtgataaacagtgctttgcgaatctagagtcattaatcaaaaccctaaatatagaattattaaatacaataatgaatatttcatggttgatttagtaagtacttggattgcttattttttgcccatgattaattggtttattcccaaaaagtacgcgaaaattagtagagaagaatttgaaagtttaaatattgtcaaacccgctaaaaataatactttctggcctgttgcaggatttgcagtgttattaacaaccttaacaagaaaatatatctatttgcttaacatccatttagaaaaagaaatagttatattaacatgctgtatgatacttctaggtgttttcgcattgtttatatatataaatacaaaattgaagttacatatttttgataaaaataaaagtaataacgaaaagatcatattaatacctacatttaaaaatatttgtttatccttatttgcttatatattatttggtggattgtcaacaatggctctgagtatgttagtaacttcatcccctcaaaatataatagaatttcttgctttaattggcatgactgcatgcttctttctactgaatatgtcatcggttctagataaaaaaattcatgttattttaaaaacaaataagtagtaaaattgattaacttaggtagtatcggatacttaaatgttggttcataaaaagcaatgattttaaatcgaggagctatcttagaacagggaaataaaacagccaaagttataaaaagtgaattaataactaattatattatgttagccacgcttcaaataaaaaataattagaataaggtgggattgataatcaatgctatgcgaatctaaaatcatcaataaaaaccccaaatatagaattattaaatataatgatgagtacttaatgatcgatataataagcacttggattagtttattttttccttttattaattggttcatccccaaaagatacgtcaaaattagtagagaagagtttgaaaatttaaatattgtgaaacctgctaaaaagaatgttttttggccagttgcaggtatctctactttattcgcagttacattaagaaagtatacacatttacttgacactcaacttgatagaaaattagttattgctatatgttgtatcacatttatagggattttaacattttatgtacgcctaattaaaaaatcatctttaaatatttataatactaaaaataaaaggtcaaaaattatcttaataccaacactaaaaaatttttgtttaacattgtttagatatgctttttttattttatggacagtgattttctcatatgctctattatcaatgagttatcaaaacataatagtatattttgcttggattacagcaataatgggtttttttctagtgaatatagctttaattatagataaaaacattcatgtcatacttaaaaattaagtgaaagtactaaattcagattaaaaatatgaaaatatcagttaataaaacctttgatgacagtaacttgatagtatttgaatgtcttttgaagtatcgaaaaatgtattacacataaaattaaagggatgtggagacattgctttgcgaatctaaagttattaataaaaaccctaaatatcgaataatcaaatacgatagtgaatatttaatgattgatttggcaagtaattggattgtcttcttctttccatttattaactggctcataccgaaaacatatgtcaaaatcactaagaatgattatgaaaaattaaatattgtcaaaccagttaaaaataaatcgataggatggaccatattcgcgggtattgtgttacttggtggtactgtaagaagaaatacttatttatttgattttcaattagaagaactaattgtttggagcagctgtttcattgggtttttagagattatatttttttattgttatctaaataagaaattaacattaaatatttataatgaaagtaaaaataatgaacttaaattaagattattaccctcctttaaaaatatttgtttcacaattttttattacctatttactggtttcatgtcttatggggcattttacttgttggtatttgaaaatgtgcaaaatttaatcttatatgtttcttggcttttcatgactatgctatttatgtttatgaatatgcattcaattatagataaaaaagtacatatattcttaaagtctaataaatagttacaaatttagttagttttcaattgttaattaggggtggtaaacagtgctttgtgaatctagacaaatttataaaaatcctaaatatcgagttattagatataataatgaatatttcatggtcgatttagtaagtacttggattacttattttttccctatgattaattggtttttgcccaaaaaatacgcaaaaattagcgaaaatgaattttaaaggttaaatatagtcgagcctgttaaaaataatgttttttggccggttgcaggaagttcagttctatttggaattatattgagaaagtacggtaacttctttaatgttcagtttgaaaaacaactagcaatcactgtattttttatcatgttaatagggatgttaattttttatttttatctaaataaaaaattaacattaaaaatttttaataccaacgtggttaataagaatagagttgtattaataccgactttcaaacaaggattgttaatagtttttgcgtacttttttttaggaagcgcttcaatatttactttaaccattcttttgacgacagagtcacaaaatataataatatttttaacttgggttattatcacgatgtttttctttttagtgaatatggcttcgataggtaataaaaatgttcatgttattttaagaataaacgagtagtaaaaatgatcgaaattggtagtatcgcatatttaaacggtggttcaaaaaaatataatcatatcttaaatcaggaaaatagatagtaatgtttgaatataccaagtgaaaatgcccattgtgattgataaaggaaaaaactgttttaatttaaaaatgaaatatagagcgtgttattttgtatgatagctcttataacattggcgtttttaatccaatagtatggacggttttagctggttttgttgcggaatctgtttagacaattcttaaaaattggacttttcatactaataaatttggattaagagataaaactaattggataagacattaaatagacgctgtttaaaaataccacagaaaaagctgtagatagtgttggaacgatagttggtgaaggtacaaaaagtattggggatcatttaaaactaatgaaacgggagtggtaaatgttgctttgcgatgtcagagtcatttataaaaatccgaaatacaaagtcattcaacataacggtgaatacttattagtcgatttagtaagcacttggttcgtgtacttttttcctttcattaattggttcattccaaaaaagtacgcgataattagcgaagaagaatttgaaaatttaaatgttgttaaaccaaataaaaataatgttttctggtcagttataggaagttcggttttgtttggagttactttaaggaaatacatacatgtttttgatgttcaattagataagctagttgtaatgatattgtgtgctctcgctttaatttgtgttatagttttttattttaacttaaatagaaagcttaagttaaaagtgtttgatacaaatattgaaaaaaataagagagttatattaataccaacgtttaaacttggctgttttttagttttcggatatattttcgctggaagtttttcaatattttcattaattgcccttatgacaatcgaacctcaaaatataataatatttatttattggattatgatgacaatgcttttctttttgttaaatatgacttcgataggtaatgaaaaagttcgcgttataatgaaaaataattgattacatttaaaatattctaaatgttgtcgacacaatccttttaagacgctagtagaatttaaatgacttctaatgtatatgaaagtgtatcaatataaaaccaattgaaaagaagtggagacattgctttgtgaaactgaaaatattaataagaatcccaaatatagaattatcaaatacaaagatgaatatttgatgattgatttagtaagtacatggttagcactctttttcccaatgattaattggctgattccaaaaaagtacgtcaaaatcagcgaaaaagattttgaaactttaaacattgtgaagacagctaaaatcaattctttttggccagtggcaggaagtacggtcttatttggtgttatgttaagaaggtattcccatttatttatcgttaaatatgaatatagtatagtaattttaatttgttgcatcataatactaggtatttttctgttttttttatatttaaatcaaaagttaaagttacaaatctataatgaaaacaaaaataaaagcaataagataatcatatttcccactttaaagagtctttgtttatcaatagttttatatatttatttaggtggtggttcattctttactatttatatgttattgacgattgaagttcaaaatataatattatttataactttgtttgtaatatttttgtttttcttatttttaaatatgtgctcactatatgacaataaagttcatgtattatttaaatcaaatggaattgaaaagttttaataggaataataaacaaaggaatggtagtgataaatattgctatgtgaatctaaagttatcaacaaaaatcctaagtatagagttattaaatatggtgatgaatatttaatgattgatttagtaagtacctggttaactttatttcttcctatgattaattggttaattccaaaaaaatatgtcaaaatcagtaaaaaagaatttgacgatttaaacattgtcaaacctgttaaaaataaagctttttggccagttgcaggtagtactattttgttcggagttacgtttagaaaatatattccttcacttaatattcaattagagaaaaacatggtgattgtaatatgttgtgcaatatttctgggtgttttaatactttttttatttctgaatcgtaagctaaggttggaaatttataataataactctagtaaagggaaaataattttatttccttcattaaaaaacttttgtttcacaatattttattattttttatttggcggtctttcaataatggctctaagtatgttattaactttaaatcctcaaaatataataggctttattggttggttggtaatgactgcaggtttctttctgttaaacatgtcatcgattattgacaaaaaaatttatgtattatctaaaactaacacggtggaaaaatgatggtttagctggatttactgcaggttctatttcggcaatacttgtatattggaccaatcaaaaaaatgaatttggaataaaagataaaaacgattggataggacataaactagacgttggtatagatgctgtagaaaaatctgcagaaaaaacagtagatggtgttgaaaatgtcatggtgaagcttcaaaaagtatttctaatcatataagccctaagaaatggagctggtaaatgttgctatgcgaatctaaaatcatcaataaaaacccaaaatatagaattattaaatataatgatgaatacttaatggtcgatataataagcacttggattagtttattttttccttttattaattggttcatcccaaaagaatacgtcaaaattagtagagaagagtttgaaaacttaaatattgttaaacctgctaaaaagaatgttttttggccagttgcaggtagctctgctttgctgggagttgcattaagaaaatatacacatttacttgacattcaacttgataaaaaattagttattgccatatgttgcatcacatttatagggattttaatattttatgtacgcctaattaaaaaatcatctttaaatatttataatactaaaaataaaaggtcaaaaatttttttaatacctacactaaaaaatgtttgtttcacattatttggatatattttatttggcggattgactatgctattcctagatgcactattatcaatgagttatcaaaacataatagtatattttgtttggattgcagttataatgggtttttttctagttaatatagctttaattatagataaaaacattcatgtcatacttaaaaaccaatagaaattaccaaattaaatttgcaatggctttaatattgtcgttcttaaatgtttttcaatttctgattcaaaagtacatgtaatttaaaggtcaacgagcaatcgcgctatatgcatatcaatttaagcaatacttattttaactgagttttatataacgttttcctattacaccgcttaaattcaagctctaattctaacatttggaagttgtattaaatcatgatagtgtgatagtggaaaagttataaagataaggagctgggtctaatgaagcaatttgtaaacttaggtaaatctgatgttgaagtgtttccaatcgcacttgggacgaacgcagtaggtgggcataatttatatccgaacttagatgaagaacaaggaaaagatgttgttcgtcaagccattaatcatggtattaatttattagatacggcatatatttatgggccagaacgatcagaagaattggttggagaagttgttaaagaatatccgcgagagcaaattaaaattgctacgaaagggtctcatgaatttgatgaaaatcaagaagtacatcagaacaatcaaccggaatatttaaaacaacaagttgagaatagtttgaaacgtctacaaactgattatatcgatttatattatattcattttccggataacaacactccgaaagatcaagcagttgcagcattacaagagcttaaggaacaagggaagattaaagcaattggtgtatcaaatttcacattagatcaacttaaagaagcaaataaagatggttacgttgatgttgtacagttagaatataatttattgcatcgcgaaaatgaggcagtattacaatattgtgttgatcaccaaatcacatttattccatatttcccattagcatccggtattttagctggaaaatatgatgagaacactaaatttagtgaccatcgtactacacgtcgtgattttaaaccaggtgtatttgaagaaaatgtgcgtcgcgtaaaagctttggaaagcatagctgcagcacatcaaacttcaattgcgaacattgtattagcattttatttaacgagaccagctatcgatgtgattattcctggtgcaaaacgtgcagaacaagtcgttgaaaatattaaagctgcagatatcgttttatcagatgatgagattcaatatatcgatgaactgtttccgattgaagactaaatgaattgtatttaatggtgatatatgtatctaatttcatcatgaattagccccgtatcacaaacgacgttatataaggcatgacgaaatttcgtcaaatttatataaaagttgtaagcgttttactattcggtaggcaaagcttatgatagtataattaggtaacgaaaaacacagatatttattaatcaaaagtgaggttaggctaaaatgattactgttttgtttggtgggagtagaccaaacggtaatactgcacaattaacaaaattcgctttgcaagatttagagtatcaatggattgacgtgacacaacatcagtttaaaccgatacgtgacgtgagacatacagcagagactattacttcatatgacgatgactatttgccgattctagataaaatattggctagtgatacaattatttttgcatcaccagtgtattggtatagcatttcagcaccattgaaagcatttatcgaacattggtcagaaacattacaagataaacgatatcctaattttaaggcacaaatggccgaaaaggattttagagttattttagttggtggagattgtccaaaaataaaagcgaagccagcaattacgcaaatgaaatatagtttagactttttaggtgccactttaaatggttatattattggaactgctgaaaagcctggtgacatcatgaaagacaactatgccttagcacgtgcaactgagtggaatagtatattgcaataagacatacctcatactaaacgaagtgattttttgcttcgttattttttatttttaattttaacggaaaatataaatatataaattgaatagacaatcattgtttattaagtattgagcaagttgtggtataatgccgttattaaaacttgttaataaggggagaaagtcatgttcaaggtaagacaagcaactgaaaaagatgttgttcaaattagagatgtcgcaactaaagcttggtttaatacatacttaaatatatacgctgcgacaacagttaatcacttgttagaagcttcatataatgaacatcatttaaagaaaagacttcaagaacaattattcttagtcgttgaagaaggtaatgacatcgttggctttgctaactttatttacggtgaagaattatatttatcagctcattatgttaaaccagaatcgcaacatacaggttatggtacagcattgttaaatgaaggattatcacgttttgaagataaatttgaaggtgtttacttagaagtagataataaaaatgaagaagcagtagcttactataaagagcaaggttttacaatcttacgctcttatgagccagaaatgtatggcgaaaagttagacttagcacttatgtacaaagcattttaagtaaattaaatattatattaaacgaaaaggaggggaataatgactaacgcatatgtagatttaaaattagtagaagaaaaagtttttaaagacccgatacatcgatatattcatgttgaagatcaattgatatgggatttaattaaaactaaggaattccaaaggttacgtcgaattagacaactaggaacactgtacctatcttttcacacagcagaacatagtcgctttggacattctttaggtgtgtatgaaatagttagacgattaattgatgagtcatttattggtcatgatgcatgggacaataaagatagaccgttggcattatgtgctgcattattacatgatttaggacatggtccattttcacatagttttgaaaaaatatttaatacagaccatgaagcatacacacaagcgattattactggagatactgaggtgaatgctgtattacgtaaagtggcgcctgagtttccaagagaagttgcggaagtaattaataaaacgcatcataataaattggtcatttcgatgatttcgtcacaaatcgatgcggatagaatggattatttacaacgtgatgcgtatttcacaggtgtatcatatggtgcttttgatatggagcgtattttaagattaatgcgaccttctaaagatgaagtactaatcaaagaaagtggtatgcatgcagttgaaaactttattatgagtcgttatcaaatgtattggcaaatttacttccacccagttagtcgtggtggagaagtgctgcttaataattgtttgaaacgcgcaaaacagctttataatgaaggctatgaatttaagttgcatccacatgattttattccattttttgaagagacagttacgattgaacaatatgttgaactcgatgaagcggtagttacgtattatttggaaaaatggacaaaagaagatgatgctattttaagtgatttagcaagtcgatttattaatcgagacttatttaaatatattccatttgatggctcaattattacaatatcagaactgcaagaactgtttgaagcaggtggtattaatccagattattattttgtgagtgaagcattttctgatttgccatatgactatgatcgaccggggtcaaatcgcaaaccgattcatttattaagacaagatggtacgattagagaaataagcaatcaatcattagtcattcatagtattacaggcattaatcgccaagactataaattatattatcctagagaaatggttgcaaagattaaagataagacaattagagaagctattgaaaatttgattaatgagcttaattaaacagggctaaaattgttatcgttaaatatggaggttatatcattgtctgagaaaaaaggctttaattttaatatcataaaaaatgaccctctagatggtcataaaggtacaaatattggttcaattagcttagacaatattgcaccagtttttatcgatgttgctaacaaagaagcatttattgatattggaggcatgcatgctcgtgccaaagttgaaaaaggtgtgaaatggattactgataaagctgctgttgaaggcgatgaagctaaagaatattggttgtgttgggtaacaacagaacgtaatgaacaaggaccatattacgctggtttaacagcgtgctatttattagtgaataaagcaattcgtcgtggttataaaagtatgcctgaacatgttaatatgatggataaatcaatgaaacatcatattatcatagatcaaattggtgacgagaataaagctattttaaaagactttttaatgaaccatgatgaaggtatgtggaagcattcttctgatgctttacatcaagcatttaattaaatattagaaactaaaatttcccaattaatctataaagatatgattcatttctcaatgacgacgtaaatcgtgaggtgaaaataatgtcttagattgattgggagtttttttaatttttttgaaattaaattaatctgtagttaataaaaaatttgaataactgacacatttttttgatcatagctatatactttgtgaattaattcacattataataagagtgaagataagagtattataaattatctttaaataaatatatgtgaagtaaaaattacacgttagcatatcgattatgtcatttcttttaacatattaactagggaaacgttaaaagttaacggttgatatctaactaaaaacaaggtcacagtagtatgttttaatctggcgtctattacaaataaaaattacatctataattattcgttttcttttttgaaagtaatagccaattaatatcatacatactggagtgactataaggaggacattattatgagagcagcagttgtaacgaaagatcacaaagtaagtattgaggacaaaaagttaagagctttaaaacctggtgaagcgttggtacaaacggaatattgtggcgtttgtcataccgatttacatgttaagaatgctgattttggtgatgttacaggcgttactttaggtcatgaaggtattggtaaagtcatcgaagttgcggaagatgtagaatcattaaaaattggagaccgtgtgtctatcgcttggatgttcgaaagctgtggaagatgtgaatattgtacaacaggtcgtgaaacactttgccgtagtgtgaaaaatgctggttatacagtagatggtgcaatggctgaacaagttattgttactgcagactatgctgtgaaagtacctgaaaaattagatccagcagcagcgtcttctattacatgcgcaggtgtgacaacttataaagctgtaaaagtaagtaatgtaaaacctggacaatggttaggtgtttttggtataggtggtttaggtaacctagctttacaatatgctaaaaacgttatgggggctaaaattgttgccttcgacatcaatgatgataaattagcattcgcgaaagaattaggtgctgatgctattattaattctaaagatgttgatccagttgcagaagttatgaaattaactgataacaaaggattagatgcaacagtggtaacttcagttgctaagacgccatttaaccaagcggttgatgttgtaaaagctggtgcaagagttgttgccgttggtttacctgttgataaaatgaacttagatatcccaagattagtgcttgatggtattgaagtagtaggttcacttgttggtacaagacaagacttacgtgaagcgtttgaatttgctgctgaaaataaagtaacacctaaagttcaattaagaaaattagaagaaatcaatgatatttttgaagaaatggaaaatggtactataactggtagaatggttattaaattttaaaaatatcaactgactatatagataaagaaggtagtgctctgaacactatcattataatcaaacacgaggttttcatgaaagatagtgaaaatctcgtgttttttggttttgaggtgttgtttgtattttataaaatggcttacatatatgaagcgttgattaagtatggaattgttaattaattgaacctatttagctttaagaaggcataacaagatgaccttattttatgctataatatttctattatgcgaagattaaggtgagtagtaaattggataaaaaagtaagtattcaaacaaagcaagtgttgaaacagcacaacgaaaaagaaaaatttgaatttactactgaaggaacttggcaacaaaggcaatctaactttattcggtatgtagaacaaattgaggatgcaacagttaatgttacaataaaagtggatgatgatagcgttaagttgattcgtaaaggcgacattaatatgaatttgcattttgttgaaggacaaacgacaacaactttttacgatatatcggctggacgaattccactagaagttaaaacattacgcattttacatttcgtaagtggagacggtggcaagctaaagattcattatgaattatatcaagataatgaaaaaatgggttcttatcaatatgaaattaactataaggagataggcgaatgaatattattgatcaagtgaaacaaacattagtagaagaaattgcagcaagtattaacaaagcaggattagcagatgagattcctgatattaaaattgaagttcctaaagatacaaaaaatggagattatgctactaatattgcgatggtactgactaagattgcaaagcgtaatcctcgtgaaattgctcaagcgattgttgataacttagatactgaaaaagcacatgtaaaacaaattgacattgctggtccaggattcattaatttttacttagataatcagtatttaacagcaattattcctgaagcaattgaaaaaggtgatcaatttggacatgtaaatgaatcaaaaggtcaaaatgtattgcttgagtatgtttcagctaaccctacaggagatttacatattggtcatgctagaaatgcagcagttggtgatgctttagctaatattttaactgcagctggctataatgtaacacgtgaatattatattaatgatgctggtaatcaaattactaacttagcgcgttcgattgaaacacgtttctttgaagctttaggtgacaatagttattcaatgccagaagatggctataatggaaaagatattattgaaataggtaaagatttagcagagaaacaccctgaaattaaagattattctgaagaagcacgtttgaaagaatttagaaaattaggcgtagaatacgaaatggctaaattgaaaaatgatttagcagagttcaatacgcattttgataattggtttagtgaaacatctttatatgaaaaaggagaaattcttgaagttttagcaaaaatgaaagaattaggttatacgtatgaagctgatggcgctacatggttacgtacaactgattttaaagacgacaaagacagagtattaattaaaaatgacggtacatatacgtatttcttaccagatattgcgtaccacttcgataaagtaaaacgtggtaatgacattttaatcgatttatttggtgctgatcatcatggttatattaatcgtttgaaagcatctcttgaaacgtttggtgtagatagtaatcgtttagaaattcaaatcatgcaaatggttcgtttaatggaaaatggtaaagaagtgaagatgagtaaacgtactggtaatgcgattacattaagagaaattatggacgaagttggcgttgacgctgcacgttatttcttaactatgcgtagtcctgatagtcactttgattttgatatggaattagcgaaagagcaatctcaagacaatccagtttactatgctcaatatgcacatgcgcgtatttgttcaattttaaaacaagcgaaagagcaaggtattgaagtgactgctgcgaatgattttacaacgattactaatgaaaaagcgattgaattgttgaaaaaagtagctgatttcgaacctacaattgaaagtgctgctgagcatagatcggcacatagaattactaattatattcaagatttagcttctcatttccataaattctataatgctgaaaaagtgttaacagatgatattgaaaaaacaaaagcacatgttgctatgattgaagcggtcagaattacattgaaaaatgcattggcaatggtcggtgtaagcgcacctgaatcaatgtaagaacatttatatacactccaacgtagagtttctcgaaagatactttgtgttggagtgtttttttaggtatgtgacatattggggaatgcttagtatgtgaataaggttaagaggaacacagttggatgctctgcacaactgcataagagagcctgagacataaatcaatgttctatgctctacaaagttataatggcagtagttgactgaacgaaaattcgcttgtaacaagcttttttcaattctagtcaaccttgccggcggggccccaacaaagagaaattggattcccaatttctacagacaatgcaagttggggtgggacgacgaaataaattttacgataatatcatttctgtcccactccctctaaaatggagggtgtaaatgttaggaactgatgaattatataaagttttatatgaacatctcggaccacaattttggtggcctgctgataatgacattgaaatgatgttaggtgcaattttagttcaaaatactagatggcgaaatgcagaaattgcattgaatcagattaaagaacatacgcattttaatccaaatcatatattagaactacctattgaaacgttacaatcattgatacattcaagtggcttttataaaagtaaatcactgacgattaaaacattattaacatggttagcacgacatcatttcaattatcaagagattaatgagcgatataaaggtggattaagaaaagaattattatctttgaaaggtattggaagtgaaacagcagatgtcttacttgtttatatattcggacgtattgaatttattccagatagctatacaagaaaaatatatgataaattaggatatgaaaacactaaaaattatgatcaattaaaaaaagtagtcacattaccaaatcattttacaaatcaagatgctaatgaatttcatgctctgttagatgtatttggtaaacattactttagagacaaagatataaagaattatgattttttagaaccttactttaaaaagtaaacgctgtgaagttagatagatgagtttatatgaaatataaaaaataatttactattttcttttagtatgtggacttatataataaatagaagcatataaagaaaaaaacagttgtttgtttgtgcagcaactgcataagagcccctaatcgctaaagctcaaggggagtaaaggaatacagttgtttgtgcagcaactgcataaaagcctctaatcactaaaggtgaagaggaacgcagttggatgctaaggcacaactgcataaaagcctctaatcgctaaagatgaagaggaacgcagttggatgctaccgcacaactgcataaatccctctaatcgctaaagcgaaaagtgggattaaaaaggagatgtgatagtgtgaagaaatcgttaattgcttttattttgatttttatgcttgtcctgagtggctgtggtatgaaagataatgataaacaaggtagcaatgataatggctcgtctaaatcgccgtaccatagaattgtttcgttaatgcctagtaatactgaaattttatatgaattaggattaggtaaatacatagttggtgtttcaacggttgatgattatccaaaagatgtgaaaaagggtaagaaacaatttgatgctttgaatctaaataaagaggaacttttaaaggcaaagccagatctaattcttgcgcatgagtcgcaaaaggcaactgctaataaagtattgtcatcattagagaaacaaggcatcaaagtagtgtatgttaaagatgcacaatcaattgatgaaacttacaacacatttaagcaaattgggaaattaacgcatcatgataagcaggctgaacaacttgttgaggaaactaaagataatatcgataaagtcatagattcaattcctgctcatcataaaaaatcaaaagtatttattgaggtttcatcaaagcctgaaatatatacagcagggaagcatacattttttaatgatatgttagaaaaattagaagcccaaaatgtgtatagtgacattaatggttggaaccctgtaacgaaggaaagtattattaaaaagaacccagatatattaatttcgacggaagctaagacaagatcagattatatggatatcatcaaaaaaagaggtggattcaataaaattaatgctgtcaagaatacacgtattgaagttgtaaatggtgatgaagtatcaagaccaggtccacgtattgatgaaggattaaaagaattaagagatgcaatttatagaaaataaaccattctaattatgccccttattgctacatgtaaaaaatacatgtttgagataaggggtttttaaaatatatttagtgaatgatagcaacgcgagtatgtgattgctataatgaatgtaattatcgatgaaagaaaagagaatgctatgacatttaataaagtattattgagctggatagtcatattgattataacaactagcatatatctattttggcagttgggcgatatcaatgatgtatttaaccagtctattttaatcaatgttagattaccgagattattagaagcattgttgacaggtatgatattaactgttgcaggccttatatttcaaacagttttaaataatgcattggcagatagctttacattaggattggcaagcggcgctacatttggttcaggattagcattatttttaggtttaacaacgttatggattcctgtattttcaataacatttagtttgataacattaataactgtattagtcattacgtcggtattgagccaaggctatccagttagaatcttaatattaagtggtttaatgattggtgcgttattcaattcacttctatattttttgattttattaaaacctcgcaaattaaatacaattgccaattatctgtttggtggttttggtgatgcagaatactcaaatgtatctataatagcaatcacatttatcattgcattgtttggtatatttatcattcttaatcaactaaagttattgcaattaggagaactaaaaagtcagtcactaggcttaaatgttcaattgattacatatatcgcgttatgtatagcttctatgataacggcgataaatgtcgcatatgttggcatcattggattcattggtatggtgataccgcaactcattagaaaatggcagtggaaacaatcattaggaagacaattggctttaaatattgtaactggaggacaaataatggttatggcagattttattggtagccatatattgtcaccagtacaaataccggcaagtattatcattgcattaattggtataccagtgttattttacatgctaatatctcagtcgaaacggttacactagcacacgacatttgctaaaataaaaataactataaacataaagagggcataagcgatggatttgaatcaaattaaagcagttgtatttgatttagaaggtacgttgttggacagagttaaatctcgagagaaatttatcgaagagcaatatgaacgatttcatgactacttaattcatgttcaactggcagattttaaaaaagcatttattgagctagatgacgatgaagataatgataaacctgatttatataaagaaatcattaaacgtttccatgtagataggttaacttggaaagacttatttaatgattttgaaatgcatttttatcgttatgtatttccttattacgatactttgtatacactagaaaagctatcgcaaaaaggctttcaaattggtgttatcgcaaatggtaaatctaagattaaacaatttcgattacattcacttggtttgatgcatgttattaattatttatcaacatcagaaacagttggttttcgtaaaccacatcctaaaatttttgaagatatgattgatcaactaggggtattacctgagcaaattatgtatgttggcgatgatgcgttaaatgatgtagctccagcacgagctatgggcatggttagtgtatggtataaacaagaagatgctgaaattgaaccactcgaagaagaagttgattttacaattacaacagtggaagaattattaaccattttaccaataaaaaatgataataaaggagaaaattatggatctatttactagaaaagatggaacatcgatacattacagtacattaggtgaaggctatcctatcgtattgattcatactgtacttgataattattctgtgtttaataaattagcagcagaattagcaaaatcatttcaagttgtgttaattgatttacgtggacatggctattctgataaacctcgtcacattgaaataaaagatttttctgatgacattgttgaattacttaaatatttatatattgaagaagttgcatttgtatgccatgaaatgggtggaatcattggtgcggatatttcagtacgttatcctgaatttacatcatcacttacgttggtaaatccaacatctattgaaggtgaattaccggaagaacgtttatttagaaaatatgcccatattattcgaaactgggatcctgaaaaacaagataaatttttaaataagcgtaagtattatcgtccgagaaaaatgaatcgattcctcaaacatgtcgtagatacaaatgaaatatcaactaaagaagaaattcaagcagttaaagaggtattcaaaaacgctgatatttctcaaacttatagaaatgtcgtagtaccgacaaaaattattgcaggagaattcggtgaaagaacaacaagattagaagctaaagaagtagctgatttaatccaaaatgcggactttgaagtatatcaagaatcaagtgcattcccatttgttgaagagcaagaaagattcgtcgaagatacagctgcatttatcaacaaacatcacgatgaaaagcatgtttaatttttagtgataagtgaaatataaaagtagtaattattatttgtaatataattgtaatatgactgttgttttagaaatgattgttgtataatggttgtgagcacaagacgatataaataaaaggagagagtgcttatgaaaaagctactaacggcaagtataattgcatgttctgttgtaatgggagtaggcttagtgaacactagtgccgaagcagcaagtggcaactctattgatactgttaaacaattaattaagggtgatcagtcattagaaaatgtgaaaattggcgaatctattaaagatgttttaactaagtacaaaaatccgatgtattcttacaatgaagatggaactgaacattattacgaattccatactaaaaaaggtatgttattagtaactactgatggtaagaaaaacaatggtaaagtaactcatatttcaatgatgtataatgatgctaatggtccaacatatcaagctgttaaaaattatgttggcaaagcagtaacacatacggaatatagcaaagttgctggtaattttggatatattgaaaaaggcaaaacgacttatcaatttgcctcagcaccaaaagataaaaacataaaattatatcgtattgatttggaaaaataataattaaattaatcgtgcttaaccgacaagttaaatcgcaatacttgtcggttattttattacatggcataatacagtgaatattaatttttatgatttgcgaaggggaaattaaaccaatacaataaataaagatgtttcattttaaaggagtactaccaatgcgtattaacgataaaattttactagaaaatatagaagattactttaatcataaaggtttatcaccgcatttgattgatgatattaaagagaaagtaattactgatataaaaaattctgaaaagaaagatcaagattatattgaatataaaagaaaatctccagcacaaatcatattaatgattcaaaggaatttgtttgctttacaaatgaatccagttattttctttattataaacttcattctcatatcctatttatatgataaacagtatgttcagtttcaagctattactggaatgagtctattttattgtttagtgatttttccaatgactattgttgtatacctaagggtgtctcaaaagaattacttgcgtagtaataaaatagaaatgattatgggtacaattatcgctatcatatccttgttattaattatattacaagcatttaatattacttggggcgttataccaattacaaattttggacatcaatttttctttttcattggtattattttagtaattgccggcatattttataagcgacttgagttttcgggaatcgggttattattttgtcaaaaaaccgtcgatgcaatgattcataatccacaatcagcccagattttttcattaattatatggatattattagtagttctagttatatatttcacaattagattatcttcacgtacaagattataaatatgataaaactattcacttgattaattgtattaattgagatgaatagtttttttattgttggaataacttttggtaatttataaataatttaaaaaaattgtttataaaatggaagcgtatatagaatgaaggttgggtatatagtttattgagggaggtgtcacaatgaataaagtcacaattaatcctcaaatccaattaacttatcaaattgaaggtaaaggggatcctataatattacttcatggattggatggtaatttagctggatttgaagatttgcaacatcaactagcatcatcatataaagtacttacttacgatttaagaggtcatggcaagtcttctaaaagtgaatcatacgatttaaacgatcacgttgaggatttaaaaattctaatggagaagttaaatattcatgaggcacatattctaggacatgatttaggtggggtagttgctaagttatttacagataaatatgcttatcgtgtaaaatcattaactaccattgcatcgaagaaagatgacttaatacacagctttactcaattgttaatacaatatcaagatgatatagcgggttttaataagtctgaagcgtatattcttttattttctaaattgtttagaaatcaagagaagacgatgaaatggtatcaaaaacaaagaatatatagcattaagtctgaggatgatagtgcggtggcaattcgttcattaattttgcataaagatgaacctatgtatttaaaaaaacgtacatgtgtacctactttgttaattaatggggaacatgatcctttgattaaagataagaatcattttaaattggaagcgcattttttaaatgttacgaaaaaaatcttcgaacattcaggacatgcaccgcatattgaagaaccagaagcatttatgaattattatttaaaatttttaaaaagcgtatcataatatgtgatatataaacctagggcataaagtccttaggcaatgtgaaaaagctgattactattcattatttgatagaaatcagctttttttgaaatgtatttgatatatactgctcgttatgcggctatcttccttatattaagtgccattagtgcaaaacctcttaacaattaggtaaaaagagcataaaaaaaggaagtttaatagaatgtatcatctatcaaacttcaccaaattgcgctaaacaaaattatagttcaatttcgttgtttgcttcagtgattcgtttatttactcgactcaataatgattcgatttttttacgttgttgtgcattaacaagaattaatacagttctttcatcatgctcattacgttttttatcgaagtaatcttcttgagataaaattttaactgctttaacaacttgtggttgtttgtagtttaaatgattaataatatctttaagatagtattctttctctttgttttcgctgatgtatgtcaatacagcgaattcttcaaagctaattgaaaattcctttttaattaaactttttaatttgtcagcataagtgaccattgataacaactcaaagcaatcattgatttttgtaattgccatgtttaaaacctccctatttgatgcatcttgctcgatacatttgcccgataatatattgatatctaatctttatttattatagatatgttagtcataattttgcattaaataagttttattaaatatatttaatgctctattatttagttaattataactaattaaaaatgagaagtaaacaaaaaagtgtttataaaacaaattattcattagacacagtgattgtatttctgggttagcatttggtttagtcaaaaatatcagcattttttataatttaccttaatttaatcgacaatacaaggtaatttatttaatgaaacgatttagcgcaattaaatgtttcgatattcaatgtgtgtctaaagagattctttgttatagcttaactcttccaagttaacttcttctactatttatacccatttttcagaattttatcactaaaaatgaaaaatttttataatttttttaatttagtaattctcagtgcagttttaatgataagaaaaacacattaatttagtgattaaaaccaatctatagcacgttaaagtgtctatacgttattccgattgataacgggtaacaaataatagaaagtacgataattgatcatgcattaaagcacttttatttttcaaactcgactcaatgaattataaaaagttgtgcattttgacttatttttaattaattgaataaccaactatgaaatattagcacgaataacataatttttgctattaatttggtgtaaattattaaaaaataacattaatttaggtcttaagaatgagttgactatcgaatttgctaaattaaaatttgttgtgtcaaagcatactacccaaatcaacgcttttctaaagatttttagaccacaaaaaaatagcttatcacttttaaaaataattacaagttaaaatgataagctaaaagttaatttaaaataatcttaaaagtataatgcctgtcaaaatacataatagaccaatagtttttctggatgtcattgctattttaggtgaaccaaataatccaaagtgatctatcaatatgcccattagaatctggccaaacatcccaataagtgttgttaatgctgcacccatatgaggcattaagataatgttagctgttacaaaagccatgccaagtataccgccagtaaaatagataggctttaatttaccgaattttaaatgacttgtttttagttttaaagaacgattaaaaatagcggttaaaatcaatagcgctattgacccaattgtaaatgatactaatgatgcaaaggctggtgaatgagtatgactagctaaagcactattaattgtcgtttgaataggtggaaagaaaccaaaaataaatcctaatagaagccaaaacagtaaatacttttgatcagttagtaataaattattcttgttaaattgattcattatgacgatgccgacaatgagtaacaatactccaattgctttaattaaatggcagtgtgtcaatagaaaaatgagaatttcttaaatttttttaataaatattactaaaagagtacagaagaagaaaaagaagcattttactagtaatatctgtcaaaaaccacagatttaaatagtatgcttctttttagattatgcattttacatacaaaatttattcgtcctgtccttccgcgctcattgtaaaccattcgcttagattaacctatattaattgacgggttcgtgcctcacacagtcatttaatataggttcacaattttgtgtgcttacatggtactttagcatttcctcactcgatttatagtcaaatatcattcgaggccgtgcattaatttgtttaacagcttcatctaatgacttttgtgttatatttgcaaaatccgtacctttaggataatactgtcttaaaagtccatttgcattttcaatagaaccacgttgatatggacaacccaaatcactaaaataaatactacaattcaattcatcttctatttcttcaaatagagcaaactccttacctctatccatagttatacttttgggtaataatggtttcataatatttataatctcattacaaactacattggatttacgtgtatttaatctactagcatataaatatcttgtctttctttcaataatagttaacaagcaatatgttgatggtctaacactccaaacagtatcaatttcataatgtccaaattcttcacgattattaatactttttgagccgatactttataacacgagaccctacgtctaatttgccacgcttttcagaagacttattatatttcttgcctgcttgtctcatatcacgcttaacatcaacttttaccaatccattgcgaatatatctatatatagtaggataacttatataataccctgtatctttttcaatttgacttgctatctgtctaggagaccattttaatgaaagtttttcttcaatatatgcttttgtttcatcattcaaacgtctacgtttagcaacttgttcatctgaaatactacgcgattttatagcatcttcctcagctaataaaggattataaacaccatcaacagaacgcttatttacttctctataaagaactgcatcatcacgacctaaaatcttagaaatctgaatgatgtttaaaccatcatttaaatactttgcgatagctagacgtgttttatagtctaattctttacgtttttttctttttttcatgtatatcctcctttacttttaaaaaggttatttataaaataagttataagaggatatatgttcatcaactcccgataccatcgctaaagcgtatagggagttgattctttattttttcatattattttcttcataaactggtttattatctttctcaaacttttcagcatcaatattagaatcttcttcatatttatcgctagtctgatttattttatatactcttgaaacttttgtattactatctttaaaaggcatataagtcattataataacctcaccatcattataaatcttataataactttttgaccgctcaacatttttatacttctttgtatttttcacatcttgaatactttctttttctaactttgtaacttcatcaatttctttatcatatttctgaccacatgcagataataatataactaatcctaaaattaatacaaaccatcgcctcatgataaattcactcctttttacgtaaattatatcattgctatcgtcttgaaacaaactaacgtcctagaggttttaaattgaaacgttttaaattatcaatacgccaaccttcagctgtacgaactaaatccaattgtgcagatgtttgacgatgttcaattttatcatctccatctgtttcaatacgttcgtcgaactgaacaaaaactttataactatcttttttagggtcataagtatcaaaataaacatgaatatcattaaccgttatatcatcatataaatcatatttatctttagaatccttaaataatgtatcgtaataatcctttgtaactaaaggctttatttgtggtgcttttgatttaaaagaagaatcttttttcatttcaaacatctgtttaacaaaatttgaagaaacttcacgtatttgtttttcttcatcagaaataactgtttttgattgtctctttactaatttatttaactctccatttttatctcttaatatacgttgttcttcctgcaaatcttcaatttgattttgtttcattttaacttgttgtttaggaatctgataaccaattaaaacagcacaaaataatattactgttacaagagtaaacataataattttttgcttcatttattttcactccttatcatgaataaaactatatccgtcagtcattttcaatgtacgttcattaactttaaaagcaccttcccaattcatttctgttattctaaatgttttaccaccatcacttacaccaataacaacagccacatgaccataatgcccatcatgaccgcctgcaccttgttcagcaataaataatgcaccaggttccggatttttatcaactttataaccctcagctttagctctatcattccatttatgtgcatcatgccaataagtcgatacaggtttacccattttttgacgcataccgtatgcataccaagtacattgaccagcagtgtataaattaccttttccagggtcatcatttgaccaatgtggcaatttaccattaaactttatagactttcctttaccattactacatgacgttttagcttctgaaccgcctaaatctttcataattttttcaactgttggtatccaacgggcattcatattattagggtcatttgacgcaccaacaggcgcatatttgggacctatttttttaggagtatctaaacctttagaaatataaacatcatacaaatttttagctcccgcattaagaccatcttcaatagttggatatgttgaatcatgaatcgattttgaacccataacagacaaaggattattttgtcttgtcgcattttctcctttaccccattgtgattcactcgcaataatggccataaaaatattcacaggtactttatttttttctgcaattttctgtatttcttttcctttaccctctaattttccacctttagcattttcgttaaacttatcaataccatttgccgaaacattaccgccactaacagtacaaccagcatcatctttacctttatttaaatcaggcgctaacaaaaacattataattactggaaatataaaaaaagccaccacacataaaatgatgatgactttcgctaatttcaatttaacgcctattggcgttttacctattacttttttagcaatatcttttttatttaccatgcttattgatatccttttgctcttttaaacggtcttttgactgagaattacgcgtaataggttgattacgatttccagattgtctactttgttgattctgtgtcgcattttgtatttgtcgtttttgaacatcagtatcataagcagtttgaactgacttctgttctttacgatttattgaatgattctcattatttaatggctgattaaccacttgtggcgacctttgtatatcttttcgctgtcttgtttctcgtacttgatgttcttgctgtgatgctttttgtggttgtttagaataattatttgcatttgattcaacagaagcagattttacatcgttaccattcattgactcttgttgttctctgcgcttattaccatttttttgattatctttatttataaataaaggcattggtttatcctgttgtcttcttcttaaatcattatcattttgaagtggtggggcgggttcatctctttgattttctcgtttagctttcttattttgcgcttgttcatgacgaatcttattaaaacgttcttgtgttcgattcatcacaccagcaccaattgcactaggagaaaaactaatattaccacgacttacaaaattgataatttgagcccgttttttatacattacaaacaatattacaattataaatattgaatttaaaaaataagcattttgactatccggttcaataaaactatttgcaagcttgatacacaaaccaactatcacaaataagaatgtcatacaagcacttaaaataatatagcctaacgtttttgcaaacgcagagaaaacagataattcaaatcctggtataaaactcactatccaactgaatactaaaaataagaataaaaataaagcaaatgtagaaaaaatcaacttcgcaaaacttattgataaaaatactatcgacataaaaagtgtaataataaaaccaatcactgaaatagccaacttttgaaatacataaccttgcgtcatatatttattatttttcttttcaacctcatctttaacaatatcatctaattctttttctgattttttatcataatcaagttttaaaatgttatcaatacggtctttaccttttgcttttatctctttttcgtcgacagttccataattcattactaaatatgttctatatatcgtcatatcaaataattgattacgtatatgattcatacctgaattctcatgaatataatcaatattaccatcaatagaagatgtactattcataattatattatttaagtccttaccaatattgtttgtaccacgtataatattacctgcattcgcaagtataccaacaccaaaaccaattaaacacataattaaaaacgctcgttttaatgcttctcttgcattaccttgtacactaaaaataataaatgcgttaaaacaaacaataataaataatgttaatgctaaattactcaataacttttgatatatatcgccaacaaaatcgccgattttatccgcaaaatcattaataacatctaattgaaataaattttcaatcgcataatctgtaacacctgctaaaatcttagtcatagaaaagaaaaaatctgacacattattaatttgacgtgaaatttcttcttgaccaaacggattccagtcgcctttttcactatatattgaacgataatgtgataaatcatacttttcaatttttggcttaactgcatgtgagggctctccaactggattagaaacagcataagcactcacagatgttaaaagcagaataggcaaaattaaaaagcataaaagatacacacttttatgcttcatcaaatcactccttatttaatatttgtttcacatcttccacaaaatcatattgttccattaaaggtgcatcaaataaaattggttcattatattgtccaagtatagaaatataacctcggccgatatcactatcatgaatcgtttgaaattctttatcagtttgaccaaaggtcatacgataaccatcatttgacaaattacctaaagacacacgtaaccctaattggtcacgcacattacctttaatcacatctgcatctggtctttgtgctgttaaaaacataaatacaccagcttgacgacctttcataataatattaattaaataatcattcatttcttgtaattcttttttatctaaagttgaagtaaaagctgttacctcatcaaaaataatgaaataggggcgcatatcaaaattacggaaatcattcccgattttataatccgaactatcattcattaatctaaaacgctcttccatttcattattagcttctctcaattgttttaatatttgacctttagtatctgcaactttatcatcaccaataacgcgcttcataaagctcaaatctgaaacttttgggtctaataaacgtacttctgaatgtctacggaataactcacgaatcacataaaataaaaaatatgttttaccacctccggttatacctgtaaccaatccatgaggtgctttcacaaaatcccaagtaatttgatgcgtaatagcaatttttgtatcataaaaaattgtatttgattcttgttcgccattcataacaatacgctttttatatttaagtggcataaattcatatctcaaataacgaccaatatgctttttttctactaattcagaattaaacattggttcaataatcgtctctaactctaaataattatcttgaaacctcgaaccgtctttcttaatatgaataacaaaagattttttaccacgcttataaaacattgttggataataatcatattcagtttgtttataatcaatagggatatactcagttgttttcttgattactgtacgattatgaaaaccttgtgtttcaatcatttcagccaaatcttttgttttaaaacgtattaaaaactgagcaataagcttacatatcacaaatataattgctgtaccaattaataaatacaataaatgcggtttaaaatatgcaaacaacgtcaatatatccaattttttattaactgatttataatcaataaacaaaatatatatacgatataccaaaaaaataaatgctaatacacttgcaaacataaaatcaatatacttctgataaggctgtatacgtacgcctttaaataaagcaatttcattcattgccatcaaatccactcctttaaaataaaaagcacatacaattttgtatgtgctaaaaattacatcgcaaatttttcttcagctttagagcttgcagaatcttcttgtgttctaaatgcttcagtcatttcctcaaatggacaatgtacaaccatttttccaacacgtccataaaaatcactgaatatacattgacctttcttcaaatctttcaacatctccatgttttcaggagattcttttgaatattctaagcctaaagattttaaaatatcctcacgttcatctttttcatcaaatgcaaaatgacaaccaaagttaccaccatcatcatctgctttatcttttaccgattgtgtaataaatacaagtgaattattctcagaacgtcccgttctttttatacgcttaccaacttttttaccttgtcttgaagcactaaaagcccaaccctcatcaataaatatagtcgtttgaacatctctacgagaaccgaatttctctaaaaacttaccaattaataacattaatgtaatcccatttttctcacttgttgaataacttgatgtatcatcatctgctttaggcatatctaaacctttaacctgtaaaatagttgctttttcttgaatatttaaagctggattcgtaccatcactaaaaacaagttttaaaatattgttttgcgttttttcaaataataaatcgcctgcattttttacatgctcatcttcattattctgtaatttttcaattacatttaatgaaccaacttttttaccattttcacgttcttcaaccgtatcagaaatagcttgataaattgctgtttcaatatgatgataattttcaaaagatttaatttcatcaaacactgatttcaacatctcattagcttcaataccatctaaaaatacaatagggtctagacaaccataattggttgaatcttcataattcaatgttacatatttaaatgtttttaaatgattaataaataggggatacttttcttgcatttccttactttctgttactctgtcaaaccattctgcaaactcagattttggatcccagtacaacatttgacctttaaaaaatgatgtataaatccataataattttgctaaaaatgatttacctttcccagtttgaccagtaattaaaacatgcggactatcactgacagcccccttaataccttttgcggccaacaataaactaaacaaaattatatcccttgaacttgcaacagcttcctcacgtgaaacagaacgtataaatttatcaatacgccctatataaaaacccgtttttgttcccaaactttgagacacaccaaataaattctctgctatacctgttgccgttgttctttgtaaccaatacttattaataaataaatcattaccatgtaaacattgataaaacaattgtaactggtcagctaatggattaactgcatatatttgagtttcctttaatcgtttcatcaaacgctttgctttacgtttacaatctctataatcatcacttttaattacaaacataaatacccactcaataaatacacctgagccagtcacttctcgttccatttgattcaatacaaacaaattatcttgaacatcttccgaagcactgtcgccagtatcttgcttttcttttgcttgttgtttatgatttattttcgcacggtcaaattttttcttaactttctcattattaatgatttttgcttttacatggcattcaaccggaaaaggcatattttgagctttctcaaataaatgtgtatattccatatctaacggaaaatcatcaacaacaactgttgttgtataaaatttctcgttatcattttcaacttctaaaacactcaagcgagtagggtcaattactgcattataaatatctgtaatagctcttcttgaagattcttcctgtacgtcatgtgttgcatttgaaataaaaggctttctaataatataagccaattcattctcagttaaacgctcgcctccaatacctagaaaactatcagccaaatctcgttcaaatgttttatacttatctaaaattttatcgtctaaattcacatcaaaaccaaaattcgaaacaatacgctcagccgtatctgataatgtactttttaaaatctctttaagtgtaactgcatcgtcagctaattcacgtattttaacacccataacaaaagaattatgcgtaatcatttgtaattcttgttctaatacgtcaatagtttcttttgaataatattcagctacattaaaagcttcatcatcaaaatctttactaatttctttaaatttatttcgcaaatctaaatcgtggtcatacatttcaaaatgaaaatcttgataacctttaatcgactctaaaaaataacgcatacgcttttttgattcttcttttgcatcataatttgctgttgatatagactcagaacgaacacgataatacgcccaaacttcgccagttttcgttaataacaaattatctcttaaacctgcatacggtgcttttaaattcatgtcatccctccaataaaaataaccccaataggggctatttaaatgttatttttttatcatgatattctacttcttcatcataacttaatttaacttttcttaactgcacattaaaaacaaatattacaaaatcccataagaagaaaaataatttctttccatcttgttttaacttaacaatatatttcgttatataataaggtgcaaccgtaaagtaaataaacataagtccaccaatcgacataattacaggctgtaataaataccaaaataacaaaaataatataaaccacacaatcaaaaatgtagcccaaaaatctaaacgaaaacccttattaatacgaaacttatctgtaaattcatacataactatcggttgttcaaaagttcgctttaaattataagcttttttatccaaatggaatcacctcaaccgccaaaaatcattttccaaacacctgcaatcgcattaaatacctgttcaggacctttagaaactaagaataaaaagccaccaacaacaaataatataaccatatgcccatatttaccactagcccattttacaataccaacaaccaatactactaaaccaatacccgtacctacttcattacttatccagtcaccaactccaccaagtgatggacggtcagcacctaaaacaaaaaaattaaataaaccactcataacattaacctccaatagaattagtcatatttttaacgtaatatttaccatctttttttgttatatctaatgtgtaatgctccaaattctccaaaggagaatctttatctttcatcaaaatttcaactttagcaacataatcatcgccttttggatataacctaatttctcttatctgagaaacttctctagttccttctaagccctcagggttatccattaaataggccatatcatcagacttactagaagcatatttattaaagaaatcttcaataaaagcttttgctttcggattgtcttcccgtttattgtctttcaaattatcctcaaccattttagcttgattcaattgactatcagggattggcgtaaaataaggatattcaacaacaacatacttattattttcactcttaataggtatatttattaaaatgttttgatttactttacgttgcttttcttctgtttttgtttcatactcatctttatctttttcacttttctttttcttcttaactttaacttctttcttttcagtaatattcacatcataattaacaatatactgtataattgtttgtttatctttacgtttaatattataaaattctttactattcaattttcgttctgtatctgaaattttttcatcaggttttttataatctgatggaaaatatttcaacaattctttttctctagattccaattcttttgaatctttcgagatattcatatacgtatcaataaacttatcagcatataactttaatttaggactatactgaactgtattcgcattatcttcatactttttttgaatcatattcgttttattaactgcttctttactgtcattatttgctcttgtagctttaataaaagaagctaataaaagaattaacaaaatagctaataatgagtaaaaacaaattacaatcatcttacgacgatttttaaattttggaattactcggcgttgttctttaggaatatcaaaatgctttccgtttttagaaaatcgtgttaaaatgtacttgcttattattttcataaacgattttctaaaatcctttacgaaatttttaataaaaatcacatcccagttatttttttaacacttatcttttgataagtgctttttttgttttaaagcctccaaataatgattaattctattcgtatgctcatcattaaattgtgaatgcgctaaaattttatctaaaaaatcagtatctgtaagcaacccctcagattgcgccatactttcggcagttaacactgtatctaaagtagtagcaacttgtttacataaccaatcaagattatcctcaatggactttaatgttggtctagtagttaaattcaatttttcagtatctttaataaataacgcccaaggtctatataatggccaccgcttacgatttttatcatttccacctttaggaggagagataaaacgcaaattattatgcaatatagactttacaatttcgcttatattatctgttctactcaacactttcgcacaattaactgcatatgcctttcgcatttgtatttcataacgattccatagcccaatgtcttcgacatcacaatgacgtttaaacgcttgttcataattcttttcataaaaacgacaatataaattgctttgtttagaaccaatataaaaagtagcgcctttacttcttccgtctgacaaattaaaaccgtttattgcgcttccagctctaaaacgtgaaacacactcagctttttcagcctttttaattaataaaggcacttttaaatatgttttataatcatcaattgcaatatcaattcttgtaaaatttgcattaactgataaacatttgtcaaaaaaatcttgccaagttttattcaactgctgtaaatgatgttcaaactctctacaacctgtaccagttaactgtaagtgaatgcccattgattcatcatcacttgaataatacaatttaatgtttgaaaattcataaccgcgattataaaagtaaatgccactatttcgttttttgaacaacgttataggcaaaccgataacgtcctcaattactgctgaaataggggctatatggaaagtgacctgaacccagtcaacaactgcctccacagcacttttatttgtacgctctacccccctattagtaaggggggtacactggttttttaaagtcatatttatttatgcctcctatcaaatcgcaagcgatttgatacatgaccgttctcgcttttttaacgcgtatttgtcgcaggctccgcccaaatgcttaacgcactccgtgcttgcatttctgcgcctgcatacgctaaaagctacacggtcatgttaaatcactaatactatatgttaaacatcaatatcgccaatataaatacaatcttccaaattcacttgtagcattctgccatgtcctgcttcactcaagctcatacacaatagacaaaggtcagcgtaaattttaggccgaccttttaccgtattttctttaacgtaactatcattaaatttagactgtatttctttagctaaagtcattaatgaaactttatcgccccaatttatacgactagcaacatagtttaaaataggttcactcaaatttgaactatttgtgtagcgatataatctatctgctgtataataatccatttacatcacctaattatttttgtttaagtgcactattagaaccaactactttaatatcttctgcattccagctatatgcgatagttccaaaatcgcctgacatttgaacatacattttaacgtctggttcaactaattcgcattcttgtaaatagtctaattccactttattaggcgttttaacagtgatttgttcgccttgttcttgactcgctaatttatatgcataaacagttttatcagtacgctctccattttcatatttatatttttcatctacacctaaaaagtttaattgtcctaaagtttttttaatatccaatactggtttcataatatatccatcctttacaaaatttttaataaaattaaacgacttctaaagggtcgcacgaataggaataactcccgcaaatccgtaccactgcatttttgataatggagtgtctatgcttctcctgacctatcatatttttaatcaaacctatcggttcatcacctcaaaaaattctaagtcttcaattgaaatatgatacatcttacaaataaatgtattagacacaccatattgttttaaaaatttataatccttataagtaaatcgataatcattcttttttgccatttcacaaacttctaatatacgaaaatatgcaaaattatacattttacaaatttttcttttagaaacaccatgaaatcttaaaattacaaatttaagataatttaattgatttgaaccatcaaaaaaaggtgtaaactcagtcataattatcaattcctttcataagaattaactgttaactaaagtttacaccaccaattaaaatcatgaattgtagcgccaaataatccaaatgtatcaataatgacacccataataatttgacccgcaactgttgcaattacagttaatgttgcacctaattttggcaataacaataaattgccagttaaaaagctaaccccaagcaaaccaccgactacccatgtgtagttaaatgattgattattgtaaaagtgaatagtaaatacttctggattgataatgatatttaaaataattaaacaaattgttccaactgaaaatgaaatgaatgaagtatagaaaggcgatttagtatacagtgatagtcttgaattgacagatgtttggataggaataagcattccaactaggacaccaatgatatagaaaagaagcatatgaataaagtctcactttccaaagttaataataaaatcatatatttacattatcattatagagaaaatatacaactcatttacaataatgttgaaaaaaacaggacattattacaacaaaatcaccctagacaatcatgatgaaagtctagggtgttagtatttatactaaattaattgcgctttctttatatctatttcttatcttcaaataaaacagttgttgttttatcaataatttgagcagaatgtactttggtgatagtaccactatttgactttataatatttaaatctactaatgcattcatactatcacgtgcaacttgctcggtcactacgttgtttaattgtggtaattgcagttttacaggcttgtctagtgaagatttaaaacttaattcaagtgttttagtcatgaatatgtcctcctgattaaattgataaagatttgatgagttcgatattgctatatgtttctccagtaagtcgctcaataagtttgctgaatgttttaatttggtcgtttgatgcatcagggttaatgttagcgaatcgacgcttaaattctgtttgtttgccgttagcgtctactttagtaaatgataatacaatagtgatgtggtttattttactcatattttaaaacctcctttcacactatatatcgaaacaaaataataaaatggctaattttattttctatgtttaaaatctataaaaaaggcaatagatatatgtaactaaaatataatatagctatgattaagacacttaaagcaaggggaggttgagtaatgaataaagtagaagcgattaaatttaatgatgatattgttaaaatgtatgaagcgctcaagataaaatctgaacgtgactatttattctttaagttagctatacatagtggattgaaagtatcagaattattaacaattacagtctctcaagttaagagactaattgaaaagtgtacgttatcagaaatgtgtaaagcacattttcattcgttgattaaaattaggttaccagaaacattatcgaaagaactacttcaatatatagaggacaggagtctttcgaatgaagacgttctttttcaatcactacgaacaaatcaagtattatctagacagcaagcatatcgaataattcaccaagcatcaattgaagctggtatagataatgtaggactaacgacattgcgtaagacatttgcatatcatgcttatcaaaaaggtatacctataccagtcattcaaaagtatttagggcatcaatctgctattgaaacactaaattttatcggtttagaaaatgagtgtgaacatagtatttatatttcattacaattatagaaacaaaggaggctaataatgagtttggtttatttattaattgctatacttgtgattatggcgatgatacttctaatgtctaaacgtagagcattggctaaatatgccgggtacatagcgttggttgcacctgtaatttcatctatctattttttgattcaaataccatcagtagctaaactgcaatatctttctacctctattccatggattaagacattagatattaatttagatttacgtttagatggtttaagtttaatgttttctcttattatttcacttattggaattgcagtattcttctatgcaactcaatatttatcctctcgaaaagacaatttaccaaggttttatttttatttaacgttatttatgttcagtatgattggtattgtattatcagacaatacgatattgatgtacattttttgggaattaacgagtgtatcatcatttttattgatttcatattggtataacaatggtgacagtcaatttggtgcgattcaatcatttatgattacagtatttggtggattggcgttattagttggttttattatgctgtatatcatgacaggaacgaataacatcacagagatattaggacaagcagatcatattaagaatcatggattgtttatccctatgatttttatgtttttattaggtgcatttacaaaatcagcacaatttccatttcatatttggctacctagagcaatggctgcacctacacctgtaagtgcttatttacattcagccacgatggtaaaagctggtatctttttattacttcgatttacaccattattaggtcttagcaatatgtacgtatatatcgttacgtttgttggtttaataacaatgttatttggttcaattacagctttaaaacaatgggatttaaaaggtatcctagcgtactctacaatcagtcaacttgggatgattatggctatggtgggtataggtggcggatatgctcaacaccaacaagacgcaatagcatctatttatgtatttgtattatttggtgcgctatttcatctaatgaatcatgccatctttaaatgtgcgcttttcatgggagtaggtattttagatcatgaagcaggttcaagggatatacgaattttaagtggaatgcgtcaactatttcctaaaatgaatctagtcatgacgatagcggctctatctatggctggagtaccatttttaaatggatttttaagtaaagaaatgtttttagatgcattaacacaaactggacaattatcccaatttagtttgatttcaatgatagctatcgtgtttgttggtgttattgcgagtgtttttacattcacatatgcactatacatggtaaaagaagtattttggacaaaatatgattctaaggtttttactaaaaaaaatatccacgaaccatggttgtttagtttaccatctcttatattaatggtgctagtacctgtaatcttttttgtaccaaatatatttgggaaggggattatcgttctagcattaagagctgtatcaggtggtaatcatcaaattgatcaattggcaccacatgtttcgcaatggcatggatttaacataccgcttcttttaaccatcatcattattttattgggtagtgtactagcaatcaaagtagattggaaaaaagtgttcacaggtaaaattagacagatttcagtttcaaaaagctatgagatggtatatcgacattttgaaaagtttgctacgaagcgatttaaacgtgttatgcaagatcgtttaaaccaatacattattatgaccttaggcatatttatgattatcattggatatggttatattcgaattggacttcctaaagtacatcagttacatgtttctgaatttggggcattagaaattatattagcaatcgtaactgtcacaattggtatttctttaatttttatacgtcaacgactgacaatggtcattttaaatggagtcatcggatttgttgtgaccttattctttatagcaatgaaagcccctgatctagcattgactcagctagtagttgaaacaataacgacgatactatttattgtcagtttttcaagattaccaaacgtgccaagatctaacgctaacaaaaaaagagaaataattaaaatttctgtatcactcttgatggcacttattgttgtatcattaatttttattacacaacaaacagatggtttatcatcaatatcagacttttatttaaaagctgacaaactaacaggtggtaaaaatattgtaaatgcgatacttggtgactttagagcattagatacattatttgaaggattagtgttaattattactgggctaggtatttacacattattaaattatcaagatcggaggggacaagatgaaagagaatgatgtcgtgttaagaacggtcacgaaacttgttgtatttattttattgactttcggattctatgtcttcttcgcaggtcataataatcctggtggtgggtttattggtggtttaatatttagttcagcgtttattttaatgtttctggcttttaatgttgaagaggttttagaaagtttaccgattgattttagaattttaatgattattggagcattggtatcatctattactgcgataatacctatgttttttggaaaaccatttttgtctcaatatgaaacaacttggatacttccaattttaggacaaattcatgtaagtacaataacactttttgaattaggtattttattctcagttgttggtgttattgtcacagtgatgttgtcgcttagcggaggtcgatcatgaatttaatattattactagttataggatttttagtgtttataggaacatatatgattttatcaatcaatttaattcgtattgtaatcggaatttcaatatatactcatgctggtaatctcattattatgagtatgggaacgtatggttctagtagatcagaaccactaataactggtggaaaccaattgtttgttgatcccttgttacaagctattgtactaactgcaatagttatagggtttgggatgactgcgtttttacttgtacttgtttatagaacttataaagtaacaaaagaagatgaaattgaaggcctaaggggggaagatgatgctaagtaacttattgattttaccaatgttattaccattcctttgtgccttaatccttgtatttttaaaaaataatgatcgtatttctaaatatttatacttaggtacaatgactatcaccacaattatttcattaatgctattaatttatgttcagcgtcaccgtccaattacgctagactttggaggatggtcagcgccctttggtatacagtttttaggagattctttaagtttaattatggttacaaccgcttcgtttgtgattactttaattatggcatacggatttgggcgtggcgaacataaagcaaatcgttatcacttgccatcgttcatattatttttaagtgttggcgtgataggctcttttctaacatcagatttatttaatttatacgtcatgtttgaaattatgttactagcgtcatttgtactcattacacttggacaatctgtagaacaattacgtgctgcaattatttatgttgtcttgaatattattggttcatggctattcttattaggtataggtttactttataaaacagtaggtacattaaacttttcacatattgcaatgcgtttgaatgacatgggagataatcgcactgttacaatgatttcattaatcttcttagtcgcatttagtgcgaaagcagcgctggtcctttttatgtggctacccaaagcctacgctgtgttaaatactgagcttgcagcattatttgcagcgttaatgaccaaagtaggggcctatgcattaattcgattcttcactttactatttgatcaacataatgatctcatacatccattgctagcaactatggctgctataactatggtcatcggcgctataggtgtcattgcttataaagatattaaaaagattgcagcttaccaagtcataatctcaataggatttatcattttaggtttaggaacaaacacgtttgcaggtattaatggtgcaatattttatttggtaaatgacattgttgtaaaaacattgctattttttattattggtagtttagtttacattacaggctatcgacaatatcaatatttgaatggcttagctaaaaaagaacctttatttggagttgcgtttattataatgatttttgctattggcggcgtgcctccatttagtggctttccggggaaagtacttattttccaaggtgcattgcaaaatggcaattatattggactagcgttaatgattattactagtctaattgcaatgtacagtttatttaggatacttttttatatgtattttggagataaagatggggaggaagttaattttaagaaaatcccgctatatcgaaaaagaattttaagtattttagtagttgtggttatcgcaatcggaattgctgcacctgttgtgttaaatgttacaagtgatgcaactgagttgaacacgagtgatcaattatatcaaaaacttgtaaatccgcatttgaaaggagaggactaaatgaatcaaatagttttaaatattatcattgcattcttatgggtattatttcaagatgaagatcattttaaattctcgactttcttttctggatatctaattggtttaattgtcatttatatattacacaggtttttcagcgatgatttttatgttagaaaaatatgggtagctattaaatttttaggtgtttatttatatcaattaataacatctagcattagcacgattaattatattctttttaaaacaaaagatatgaaccctggattactttcatatgaaacaagactaacaagtgattggtcaataacatttttaacaattttaattattataactccagggtctacagtaatacgaatttctcaagactctaaaaagttttttattcatagtatcgacgtgtcagaaaaagaaaaagatagtttgttaagaagtattaagcattatgaagacttaatattggaggtgtcgcgatgatacaaacaataacacatattatgattattagttcactcattatttttggaattgcattaatcatctgtttatttagattaatcaagggacctacaacagcagatcgtgtcgttacatttgatacaacaagtgctgtcgtaatgtcaattgtgggtgtgttaagtgtacttatgggcaccgtttctttcttagattcaatcatgctcattgccattatatcttttgtaagttctgtttcaatatcacgctttattggtggggggcatgtgtttaatggaaataacaaaagaaatctttagtcttattgctgctgtgatgttgttgttaggtagttttattgctcttattagtgcaataggtatcgtgaaattccaagatgttttcttaagaagtcacgctgcgacaaaaagttcaactttatccgtgttattaactttaatcggtgtattaatttattttattgtgaatacaggatttttcagtgtgcgtttattactgtcacttgtttttattaatttaacttcaccagtcggcatgcacttagtcgctcgcgctgcttatcgcaacggcgcttatatgtatcgaaaaaatgatgctcacacacatgcatcaatattattaagttcaaatgaacaaaactctacagaagcattacaattacgtgctgaaaaacgagaagagcatcgtaagaaatggtatcaaaacgattgaagtgttggctaaattgttaagcataacaatgcttttgaaaatctgttttcaaaattaatcattaaaagagtactttgaaattggttagtcgattttaaggtgctcattttttgtattataagttaatgttgttatgtgaaagcaagttgtttatttatacaaacaattagtgataaaataaaattaaataattgcaaatttaagtactgcaatcgtagacatatatctatattaaagtgcttttgtggtcgctaactcaatttatcctctaaagtataattacaacgagatgtgatacttaattttcaattaaacaatactttttagagaggtgaaagtttggaaatatttgaaacaattcttatatttatagctgttgtgatactaagttcgtttgtccatactttcatacctaaagtacccctagcatttatacaaattttcttgggcatgttactatttattaccccaatccctgttcaatttaattttgattctgaattgtttatggtaacaatgattgcgcctttgttatttgtagaaggtgttaatgtttctagagtccatttaaggaaatatattaagccagtgatgatgatggcattaggattagtcattactactgtgataggtgtaggtttatttattcattggatttggccagatttacctattggagcagcatttgcaattgctgccattctttgtcctactgatgcagtagcagtgcaagcaatcactaaaggaaaggtcttgccaaaaggagcaatgacaattcttgaaggtgagtcattattgaatgatgctgctggtattatttcatttaaaatagctgttggagtattagttacaggtgctttttcacttgttgatgctgttcagttgtttttaattgcatcaattggtggcgcagtggttggtttacttataggtatggcattagtaaggttccgattaacattgatgcgtcgaggatatgaaaacattaatatgtttacaattattcaattgttaacaccatttgttacgtatttaattgctgaattgtttcacgcatcaggaatcattgcagcagtagttgcaggacttgtacatggtttcgaacgtgacagaattatgcaagtacgtacacaactgcaaatgagttacaatcatacatggaatatactaggttatgttttaaatggctttgttttttcaatattaggatttttagtacctgaagttattattaaaattatcaaaacagaaccgcacaatttaatctttttaataggcatcactattgttgttgctttagctgtctatctatttagatttgtttgggtttatgtcttatatccttatttttatttagccatcagtccattccaaaaaatgatgactaaaaatgatgatgataatccaacgactgagaaaccaccaaagcgaagtttatacgctttaattatgacgttatgtggtgtgcatggaacaatttctttagcaatcgcattaacgttaccgtattttttagcagggcatcatgcttttacgtatagaaacgacttattatttattgcatctggtatggttattattagtttggtagttgcgcaagtattattgccattattaacgaaacctgcacctaaaacagtaattggcaatatgtcgtttaaagttgctagaatttatatattagaacaagttattgattatctaaatcaaaaatctactttcgaaacaagttttaaatatggtaacgtgattaaagaatatcatgataaattagcatttttaaaaactgtagagaaagatgatgaaaactctaaagaattagaacgtctacaaaaaattgcttttaatgtagaaacaaaaacattagagtctttagtagatgaaggacaaataacgaatagtgtacttgaaaactatatgcgttatgctgaaagaacacaggtatatagacaagcatcattaataagaagaatgattgtattattacgaggtgctttattaaaacgaagagtacaaacgagagtgaactccgcatcttcacttagtgttacggataacttaatggaattaaataaaattaataaattagtccattataatgtggttagtcgtttgtctaaggaaacaacaaaagataatacacttgaagttggaatggtttgtgacggttatttaatgcgaattgaaaacttaacaccatcaaatttcttcaactcagcaagtgaagatacgattactaaaattaaattaaatgcattgagagaacaacgtcgcattttacgtgagttgattgatacagatgaagtatcagaaggtacagcgttaaaactaagagaagccatcaattatgatgaaatggttattgtagatagtatgacgtagttcctaattatgctaaaagggattgatgaaaaactgaagggcttttcatcaatcccttttattttaggggaattgaatagatagttttaaactatacgaattattaatatttgagatttaattgaaataagttttaaaaattggaggagatagattaagcgaagtcatttaaaggtgaagttaagtgtattcacaaaaaatagccacactcatatgacatcggatgagtgtggcttaaggatctatggggggaggaaaccatagatgtttactttgataggccagattaaatatcaaagtatgcgattatttatagcttgatgcaaaagtggtatgcctattaaaagttactgcacatagcttttaatattccgttcaaaggaaaggggcatacaattgaacaatctgtaatagtacttttaaccagctatgctaaaagtctagtagggagaacagttgtccaatcacataagaacctctaacttcgttagtacgattaagaaaagctttttagttagtatgtaatacaatttattgacgcgcgtgaatctcttttataagagtgtgtagggaatggcgttgtataaattgtattagaagaacttctaacgcatctctgtggttaaaagagatgaagggaacgacagtttaattaaaactgcataagaacttctagcttttctctctcgttcaaagagaagcagctgttcgcagtttaatcaaaaccacataaagcttttaactttactctttgatttaaagagtgataaatgtttacagtttaattaaaactgcataagaacttctagcttttctctttcgttcaaagagaagcagctgttcgcagtttaatcaaaaccacataaagcttttaactttactctttgatttaaagagtgacaaatgtttacagtttaattaaaactgcataagaacttctagcttttctctttcgttcaaagagaagttctaataccaccatatcgtgcgatcgggaacggtatatatattaataggagggtaatatatatttaacgcacgatatgggactattagccttcgactttgttatgttgatgtgtggcctaaaatattggagataccaatattttaggttgcatcaacatcaattcatcttacttcattaaaacacagcgtgttatttcatgcttccgtgtacagtttcaatatttgatttcatcattttgtagtaagagtcacctttagtgccttctttaccgattgaatctgtgtacacttcaccaaagatatctttcttcgtttcttcagataaactttccattgctttcttatcaacacttgtttctactaataagtgttttaatttgtgctttttaacaaactcaatagcttgtctcatttgttcaggtgtaccttgtttttcagtgttaatttcccaaatataacctggtgtaataccgtattgttttgagaagtacttgaaggcaccttcacttgtaatcatggcacgttgttcttttggaatgtcattaaatttgtctttactgtcattatttaatttttccaattgagcaatgtatttgttaccttgcttttcataatctgctttatgttttttgtcgttatcgataaatgtttgttgaattgtttttacgtatttaataccgttatctaaacttaaccatgcgtgtggatcttgtttatctttgttgccttcttcaccgtttaaatagataggtttaacatcttttgatactgcgataacttttttatcttttaatgatttaccagcctgttctaaggctttttcaaaccaaccgttaccagtctctaaatttaatccgttgtataaaataacgtcagcgtcagttaactttttaatatctttaggtttaacttcatattcatgaggatcttgaccaacaggtacaatactatgaatatcgacgttgtctccaccaacatttttagccatatcatataaaattgaattcgtcgttactacttttaatttgccatttgacttatcactgctttgtttaccaccagtaccacatgcagcaactagaagtaataaggctaataataaaggtactaattttttcatgttaaacttcctcgtttctttctattcgtaaattttgtgaaaaataatgtgatgatataaattacaaacgtacaaagtacgattgtcgcaccactaggaatgttgtaaatatagctgtaataaagtccgacaattgaacttatgacacttattaaacttgctataatcatcattgagtatagttttttactaattaaaaatgctgtagatgcaggtgtaattaataatgcaactacaagaataatacctaccgtttgaatacttgctactgttactaatgagagtaacaacatcacaaagtaatgtaataacgtcgtatttagaccactcattctactaaacgttggatcgaatgtagaaatcattaatggacgatagaaaataatgattagaataaggacgattgaaccaatcacaatagttgttaaaaatgcactatttgtgattgccagtaaattaccaaacagaatatggtacaaatctgtcgtagtgtttattaagctaataataataatccccgaagctaagaaagcggtaaaactaattccaatagcggcgtcaggtttcgttttactactagatgtgatataaccgataaaaatacttgcgatcataccagttataagtgcgcctacaaacattggaataccaaataagaatgatagggcaacaccaggtaatactgcgtgactcattgcatctcccattaatgaaagaccacgtaatacaattaaactaccaactgtaccacaaactatccctacaataattgaagttatcaatgctcgattcaagaattgatatgtaaataaatgttcgacaaactctaacatgttatattgctcctttgactagggtcactacagtcagtgctactcataaatgtttcgtttaagcgagtgacactcatagcctcttcactatcaccaaagtatcgtaatgtttgatttaatagaataatgcgatcaaagtattgctttgcttttgatagatcatggtggatgataagaataagttttccttgttgttttaagttctcgatttttgtcatgattaatttttcgctactaaaatcaattccgacaaacggctcatctagaaaataaacttcactttcggacatcaatgctcttgctactagcacacgttgtaattgtccaccacttaattctgaaatttgtcgatgacgtaaagattctaattctaaatcgcttaataactgtttgagtttatcccttgctgatttattaggtcgtctaaaccatccaatttctttgtagcaacctgataaaatcacttgttccacacttataggaaaatctaaatcaatatgtgctttttgtggaatatatgtaatatgttgcagttgttgttgtataggtttgttatataacaatttagtaccggtagcattaaattcaccaattaaagacttgataagggaagatttaccagcaccattcgggcccatgataccaattatttcgccgcgtactggtatcgataaggaaatgtttttaagtacatgcttattacctaaaaacagatttaaatcttttgtttctaacaaacgtttatacctcctaattaaaagtttaggctaacctaattaattgtataataaactgagaatatttatcatgtcaagtaaattcgtgatataatatagacaatgtatgtgaggtgaaagtatgttaactgaagaaaaagaggactatttaaaggcaatccttacgaataatggcgataaaaactttgtgacaaataaaatcttatctcaatttttaaatattaagcctccatctgtaagtgaaatggtaggacgtcttgaaaaagcaggctatgttgaaacaaaaccatacaaaggtgttagattaacagaggatggtttaacgcatacgcttgatatcattaagagacatcgactattagaattatttttaatagaaatattgaaatataattgggaagaagtacatcaagaagcagaaattttagaacatcgaatttcagatttatttgttgaaaggctggatagcctgttaaatttcccagaaacttgcccgcacggcggtgtgattcctagaaataatgaatataaagagaaatatataacaacgattttgaattatgaacctggtgatatcgttacaatcaaacgtgtgagagataagaccgatttgctaatatatttgtctagtaaagatatttctattggtaatgaagtggaaattgtatcgaaagatgaaatgaataaagtaattatcattaaacgtaatgataatgtaattattgtcagttacgaaaatgcaatgaacatgtttgctgaaaaataaaataaagaagccataaagatatccatgattgaactgataaagacatatggataattgctttaggcttcttttttattagttaatttatcaagtgagtatatttgagtaaaatattcactgcataaagattgaagataatccagattgtactataaatgaagataggtacatgactgagttctttaagtgcactaccatcccactgtggactcggacgctggaaagtcaatttagcaatcgtccaactagattgtagaacttcgcctaataatacacctaaaatatattgataactcattgtgacaagtagttgaatttctactatattttcatcttttaatataaaatacaacatgatagaaattaaagttataacaacaatgggtgagccttttctagatgttaaaattaaaaaataaataaatatcaataaataggtaaatataaagaaactaggtatctgataatggctcgacgctaaacctatcaataacataataggtggcataaaataaccaccaatcgttgtaagccattggcctgctagatgtctagattgtgtaattgcgaatccttgttgtaatgtctgttgtcgctctcgtggacttgttacaatgactaaatcttttgcacggccaccagcgagtttattaaacagtacatgaccaaattcatgtgttaaaacagggatatagtttaaaatgacatctaaatagttcaaaacaggcttatgtctatattgatgaatagcaatataacaagctgcaacaataacgataatgtatatattaagttgaattgtcgtattaaaaaagtttgataaataattcattgttaacctcatataagatattaatttaaagtttgcttatcacttattataaatgatattggcatcaatagcgttagactttagacttaccttagttaaactaattttaatttttgaaaaggtgaatatgtgttaaaataaagcaaaatcatttcgatataaataggatgaatataaatactgttaatattgattacactaacataataatgaaataagataggagattcctgttatgactgttgaagaaagatccaatacagccaaagttgacattttaggggtcgattttgataatacaacaatgttgcaaatggttgaaaatattaaaaccttttttgcaaatcaatcaacgaataatctttttatagtaacagccaaccctgaaatagtgaattacgcgacgacacatcaagcgtatttagagttaataaatcaagcgagctatattgttgctgatgggacaggagtagtcaaagcttcgcatcgtttaaagcaacctctagcgcatcgtatacctggtattgagttgatggatgaatgtttgaaaattgctcatgtaaatcatcaaaaagtatttttgctaggggcaactaatgaagttgtagaagcggcacaatatgcattgcaacaaagatatccaaacatatcgtttgcacatcatcacggttatattgatttagaagatgagacagtagtgaaacgaattaaactgtttaaacctgattacatatttgtaggtatgggattccctaaacaagaagaatggattatgacacatgaaaaccaatttgaatctacagtgatgatgggcgtaggtggttctcttgaagtatttgctggggctaaaaagagagcgccttatatctttagaaaattaaacattgaatggatatatagagcattaatagattggaaacgtattggtagattaaagagtattccaatatttatgtataaaatagccaaagcaaaaagaaaaataaaaaaggcgaaataatcatgatgacaaaaataaaaccgaggaaatccttaaatggagattctcggttttttcggtttatttaataacgaagcgggactcatcgagtttgtttctaaattctttttgttcggctttggatttctttttaaaatcgttaaggaaagcttcatatttaggtaatacatcatcaagttcaccgtaatcttttaactttccgccttcaatccaagcaatcttagtacaaaattgtctcacttgtcctaagttatgactaacgaaaaagatggttttgttttgctctttaaactcgtaaattttatctaaacatttttgtgcaaaagtttggtcacctacagataaagcttcgtcaatgactaagatatctggattaactgtgatattaattgaaaaaccaagttttgcacgcataccacttgaatactttttaactggttgataaataaactcaccaagttcactaaattcaataatcttaggtgtcatcgctttaatttcttttcgcttaaagcccatacataacattttaaattcgatattttcaatccctgtaagttgtccactcaagccagcactaattgcgataacgctgacttcaccattacgatccactttgccaacagtaggcgacaaagaaccgccaatgatattgctcaacgttgatttgccggaaccattgatgccaacaagccctatgacgtcaccttcatatgcttttaaactaatgtcatctaaagcgaaaaatgttttgtttttatgtttgggaatgagcgcatctttcatacgttctttatttgtacgataaatacgatattcttttgttacatttttaatgtttaccgaaacgttcatttgtagaccttccttattcacatttatctagattataatatactactcaacagttgttaaattttaaaacctgttgtaaagtgtatagaagattttgttattatcagagtgggtgttttgacacaaaatgttaatcatcaatgataacaatgatatttaaaaactaaacttatttcaacttacatgattgtatactataatgtatttgtaataaactaatattttaaagaactagacaataattttgatagcatccatgtatagtgatagtatttacaacaattattataatactatttagttaagtagagaaatagttaaacatttgaaagtgtggtttaatggaatgtcagcaataggaacagtttttaaagaacatgtaaagaacttttatttaattcaaagactggctcagtttcaagttaaaattatcaatcatagtaactatttaggtgtggcttgggaattaattaaccctgttatgcaaattatggtttactggatggtttttggattaggaataagaagtaatgcaccaattcatggtgtaccttttgtttattggttattggttggtatcagtatgtggttcttcatcaaccaaggtattttagaaggtactaaagcaattacacaaaagtttaatcaagtatcgaaaatgaacttcccgttatcgataataccgacatatattgtgacaagtagattttatggacatttaggcttacttttacttgtgataattgcatgtatgtttactggtatttatccatcaatacatatcattcaattattgatatatgtaccgttttgttttttcttaactgcctcggtgacgttattaacatcaacactcggtgtgttagttagagatacacaaatgttaatgcaagcaatattaagaatattattttacttttcaccaattttgtggctaccaaagaaccatggtatcagtggtttaattcatgaaatgatgaaatataatccagtttactttattgctgaatcataccgtgcagcaattttatatcacgaatggtatttcatggatcattggaaattaatgttatacaatttcggtattgttgccattttctttgcaattggtgcgtacttacacatgaaatatagagatcaatttgcagacttcttgtaatatatttatatgacgaaaccccgctaaccattaataaatggaagtggggttcatttttgtttataatttaagtaaataacatattaagttggtgtattatgaacgttttaataaagaaattttatcatttggtagttcgaatactttctaaaatgattacgcctcaagtgattgataaaccgcatatcgtatttatgatgacttttccagaagatattaagcctatcatcaaagcattaaataattcgtcgtatcagaaaactgttttaacaacaccaaaacaagcgccttatttatctgaacttagcgacgatgttgatgtgatagaaatgactaatcgaacattggtaaaacaaattaaggctttgaaaagcgcgcagatgattattatcgataattattacctattactaggtggatataataagacttctaatcaacacattgttcaaacgtggcatgcaagtggtgcattaaaaaactttggcttaacagatcatcaagtcgatgtgtctgacaaggcaatggttcagcagtaccgtaaagtttatcaagcgacggatttttacttagtgggttgtgaacaaatgtcacaatgttttaaacagtctttaggtgcaacagaagagcaaatgctgtattttgggcttccgagaattaataaatattacacagctgatagagcaacggttaaggcagagttaaaggataaatatggaattacaaataagttggtattatatgtaccaacatatagagaagataaagcagataatagggctattgataaagcttattttgaaaaatgtttaccaggatatacactgattaataaattacatccatcaattgaagattcagacattgatgacgtatcttcaatcgacacgtctacattaatgctaatgtcagatataattattagcgactatagttcgctgccaatagaagctagcttgttagatattccaactatattttatgtgtatgatgaaggaacatatgatcaggtgagaggcctgaatcaattttacaaagcaataccggatagctacaaagtgtatactgaagaagatttaataatgacgatacaagaaaaagaacatctattaagtccgttatttaaagattggcataagtataatactgataaaagtttacatcagctcacagaatatatagataagatggtgacaaaatgaggtttacgataatcatacctacatgtaataatgaggcaacaattcgacaattgttaatatctattgagagtaaagaacactatagaatcctttgtattgatggtggttctactgatcaaacaattcctatgattgaacggttacaaagagaactcaagcatatttcattaatacaattacaaaatgcttcgatagctacgtgtattaataaaggtttgatggatatcaaaatgacagatccacatgatagtgacgcatttatggtcataaaaccaacatcaatcgtattgccaggtaaattagataggttaactgctgctttcaaaaataatgataatattgatatggtaatagggcagcgagcttacaattaccatggtgaatggaaattgaaaagtgctgatgagtttattaaagacaatcgaatcgttacattaacggaacaaccagatttgttatcaatgatgtcttttgacggaaagttattcagtgctaaatttgctgaattacagtgtgacgaaactttagctaacacatacaatcacgcaatacttgtcaaggcgatgcaaaaagctacggatatacatttagtttcacagatgattgtcggagataacgatatagatacacatgctacaagtaacgaagaagattttaatagatatatcacagaaattatgaaaataagacaacgagtcatggaaatgttactattacctgaacaaaggctattatatagtgatatggttgatcgtattttattcaataattcattaaaatattatatgaacgaacacccagcagtaacgcacacgacaattcaactcgtaaaagactatattatgtctatgcagcattctgattatgtatcgcaaaacatgtttgacattataaatacagttgaatttattggtgagaattgggatagagaaatatacgaattgtggcgacaaacattaattcaagtgggcattaataggccgacttataaaaaattcttgatacaacttaaagggagaaagtttgcacatcgaacaaaatcaatgttaaaacgataacgtgtacattgatgaccataaactgcaatcctatgatgtgacaatatgaggaggataacttaatgaaacgtgtaataacatatggcacatatgacttacttcactatggtcatatcgaattgcttcgtcgtgcaagagagatgggcgattatttaatagtagcattatcaacagatgaatttaatcaaattaaacataaaaaatcttattatgattatgaacaacgaaaaatgatgcttgaatcaatacgctatgtcgatttagtcattccagaaaagggctggggacaaaaagaagacgatgtcgaaaaatttgatgtagatgtttttgttatgggacatgactgggaaggtgaattcgacttcttaaaggataaatgtgaagtcatttatttaaaacgtacagaaggcatttcgacgactaaaatcaaacaagaattatatggtaaagatgctaaataaattatatagaactatcgatactaaacgataaattaacttaggttattataaaataaatataaaacggacaagtttcgcagctttataatgtgcaacttgtccgtttttagtatgttttattttctttttctaaataaacgattgattatcatatgaacaataagtgctaatccagcgacaaggcatgtaccaccaatgatagtgaataatggatgttcttcccacatacttttagcaacagtatttgccttttgaataattggctgatgaacttctacagttggaggtccataatctttattaataaattctcttggatagtccgcgtgtactttaccatcttcgactacaagtttataatcttttttactaaaatcacttggtaaaacatcgtaaagatcattttcaacataatatttcttaccatttatcctttgctcacctttagacaatatttttacatatttatactgatcaaatgagcgttccattaatgcattccccatcatattacgttgcttctcgccaccaaggtttttatagtctcctgcacccatgataacttgattaattctaaatttacctcgtttggtagtaatcgtatggttgtaatttgctgtatcacttgatccagtttttaaaccatctgtacccggcaaactcatttttgcaccttccaatgaaaagttgaatgtgtaatacgtaactgcatgcgttgttggtgctaactgctttgtaaagtctaatattttaggtgtctctttaatcacgtgtaaatctaaaatggcatagtctctagcagtcgttacagtacgttcttggtctttatactttgttggtgcaaatgtacgtaatcttgaattttcagcacccgttggattgacgaaatgtgtatttttcattccgatagctttagctttgttattcattaaatcaacgaaatcgctggtgttttttgaaaccttcttagctaaaattaatgccgcggcattactagaattagatactgtaatttgtaataggtctgcgattgtccatacttgtccaggatatagtttcgtattactcaactcaggtagtgtagacataatatattctttgttcgtcattgtgactgtgtcatcaagtgaaagctgccccttatttacagcttccaatgttaagtacattgtcattaatttagtcatagacgctggattccacttagtatcgatattgtattgatacagtaattgtccagtttgacttacattaacagcactcgtcggttcgtatgcagccgacaaacctgcataaccatattgatttgctgcttgtacaggggttacgtcactgttagtagcttgtgcatatggtgtcataatacttaatgttaaacataaaatgatgataatagatattaaatttttcataaagcgttaatcttcccttttccaattcttaaatattccctaaaagcaatggttattcctacttacggaaatcattgctaattcacttcaccttaattaaattgttgaaaataaagttttctgcagttaatttgaaaaataatgcaaatatattacgtgtgtagctaaaggtgttataatgtttgtacgaagagcaaacttactcaaaagcgattaattttcatgttttaatataaagactttgagaagttattacaaaaaatgcaatagaaatattctatcatataaatgttatgagcggtattttggggcaacactttatttgatttttaaagttttgttgggagaaagtatatgatagaaatgcatgtatctatctaaatgaattaactataaatttcaaacagaagaggtaaaactatgaaacgagaaaatccattgtttttcttatttaaaaaactatcatggccagtgggtcttatcgttgcagctatcactatttcatcactagggagcttaagtggactattagtgccactgtttactggacgaattgtagataaattttccgtgagccatatcaattggaatctaatcgcattatttggtggtatctttgtcatcaatgctttattaagcggattaggtttatatttattaagtaaaattggtgaaaagattatttatgcgatacgctcagttttatgggagcatatcatacaattaaaaatgccattctttgacaaaaatgaaagtggtcaattaatgagtcgattaactgacgatacgaaagtgataaatgaatttatttcacaaaagctacctaacttattaccatcaatcgttacattagttgggtcactaatcatgttatttattttagattggaaaatgacattattaacatttataacgataccgatattcgttttaattatgattcctctaggtcgtattatgcaaaagatatcgacaagtacacaatctgaaattgcaaacttcagtggtttgttagggcgtgtcctaactgaaatgcgtcttgttaaaatatcaaatacagagcgtcttgaattagataatgcacataaaaatttgaatgaaatatataaattaggtttaaaacaggctaaaattgcggcagttgtacaaccaatttcaggtatagttatgttgctaacaattgcaattattttaggttttggtgcattagaaattgcgactggtgcaatcactgcaggtacattaattgcaatgatattttatgttattcagttatctatgcctttaatcaatctttccacgttagttacagattataaaaaggcagtcggtgcaagtagtagaatatacgaaatcatgcaagaacctattgaaccgacagaagctcttgaagattctgaaaatgtattaattgatgacggtgtattgtcatttgaacatgtagactttaaatatgatgtgaagaaaatattagatgatgtgtcgttccaaatcccacaaggtcaagtgagtgcttttgtaggcccttctgggtctggtaaaagtacgatatttaatctgatagaacgtatgtatgaaattgagtcaggtgatattaaatatggccttgaaagtgtctatgatatcccgttatctaagtggcgacgcaaaattggatatgttatgcaatcaaattcgatgatgagtggtacaattagagacaatattttatacggaattaatcgtcatgtttcagatgaagaacttattaattatgctaaattagcgaactgtcatgattttatcatgcaatttgatgaaggatatgacacgcttgtaggtgaacgaggattgaaactgtctggcggacaacgtcaacgtattgatattgctagaagttttgttaaaaatcctgatattttgttacttgatgaagcaacagctaatctcgatagtgaaagtgaattgaaaattcaagaagctttagaaacattgatggaaggtagaacaacgattgtcattgcgcatcgtttgtctacaattaaaaaagccggtcaaattatattcttagacaaaggacaggtaacaggtaaaggtacgcattcagaactgatggcatcacatgcgaagtataaaaactttgtagtgtctcaaaaattaacagattaattttatatatataagtaagcttggagcaaatacacatataccatcgaggaaattaaagtgtggcacattgatggatatagatgttaataaattgcttcaagcttttgtctattttaaatcatttgagaagttacgacataataattcttaaattaatgaaatcgatattttaagaaaaaaatgctcatggtataatacaagttataagcaaacatacatatattaaatactgtagccacgagtcataattcttcgtattttacatagcaatttaactgattttagagtccacggtacagaagtttgatatttcaatgtttctaaatttttaaaaaattaaatcataggtgggtgccaaatgtttttattaatcaacattattggtctaattgtatttcttggtattgcggtattattttcaagagatcgcaaaaatatccaatggcaatcaattgggatcttagttgttttaaacctgtttttagcatggttctttatttattttgattggggtcaaaaagcagtaagaggagcagccaatggtatcgcttgggtagttcagtcagcgcatgctggtacaggttttgcatttgcaagtttgacaaatgttaaaatgatggatatggctgttgcagccttattcccaatattattaatagtgccattatttgatatcttaatgtactttaatattttaccgaaaattattggaggtattggttggttactagctaaagtaacaagacaacctaaattcgagtcattctttgggatagaaatgatgttcttaggaaatactgaagcattagccgtatcaagtgagcaactaaaacgtatgaatgaaatgcgtgtattaacaatcgcaatgatgtcaatgagctctgtatcgggagctattgtaggtgcgtatgtacaaatggtaccaggagaactggtactaacggcaattccactaaatatcgttaacgcgattattgtgtcatgcttgttgaatccagtaagtgttgaagagaaagaagatattatttacagtcttaaaaacaatgaagttgaacgtcaaccattcttctcattccttggagattctgtattagcagcaggtaaattagtattaatcatcatcgcatttgttattagttttgtagcgttagctgatctatttgatcgttttatcaatttgattacaggattgatagcaggatggataggcataaaaggtagtttcggtttaaaccaaattttaggtgtgtttatgtatccatttgcgctattactcggtttaccttatgatgaagcgtggttggtagcacaacaaatggctaagaaaattgttacaaatgaatttgttgttatgggtgaaatttctaaagatattgcatcttatacaccacaccatcgtgcggttattacaacattcttaatttcatttgcaaacttctcaacgattggtatgattatcggtacattgaaaggcattgttgataaaaagacatcagactttgtatctaaatatgtacctatgatgctattatcaggtatcctagtttcattattaacagcagctttcgttggtttatttgcatggtaatatgtcgaagagtgactatgataatacattttaactaataaatatgtccaggcatgtcgtctattgatataggtgagatgcttggacttttttattattgatataaaggtatttaaatatttttaaagttaccgaaattgaagcattataaaaaccaagtgcacatggtaatacacttggcttttatgggaaatgaatattattgtacatatgacagtaaggactaggtacagtcatagtacttcgagcaaaatttgttttgttattataaacaacacaaaggagataacttctctattgaagaagttaaaaacattatagcagacaatgaaatgaaagtaaattaaaaattcagaatatttttaattattatattgtgagtgatatttattagggaaagctattcttcatataaattagttaaatagtaaatctttgttagaactctttccatagagttgtgacagcatttttgttgtgctactatttttatagtctaataaatatataaaggggatggtttcgtgaataaaacggttaaagatttaatactagttgtcttaggttcatttatctttgctgcaggtgtaaatgcatttattatttctggtaacttaggtgaaggcggggttacaggtttagcaattattttatattatgcgtttcatatttcaccagccatcactaacttcttggtcaacgcagtattgattgccataggttataaatttttgagtaagagaagtatgtacttaactattcttgtaacaattcttatttcaatatttttgagtttaacagaatcatggcaagtagaaactggaaacagcattgtgaatgccatttttggtggtgtaagcgttggactaggaatcggagtaattatccttgcaggcggtacaacagcaggtacaacaattttggcgagaattgcaacgaaatacctcgatgtaagcacgccatatgctttgcttttcttcgatatgatcgttgttgcaatttcacttacagttattccacttgataaagtattagtaacagtaatatcactttatataggaacaaaagtgatggaatatgtcatagaaggtttaaacactaaaaaagctatgacgattatttcaactaatcccgacaaacttgccaaagcaatagacgagcaaattggaagaggtttaaccattttaaacggacatggctattatacgcgtgaagaaaaagatgtcttatacgttgttatttctaaaacacaagtttcaaaagcaaagcgattaattaaacaaatcgataaagatgcattcctcgtaattcatgatgtaagagatgtctatggtaatggctttcttgcagatgaataaataaatggtatgagcacacatacttaaatagaagtccacggacaagtttttgaactatgaagacttatctgtgggcgttttttattttataaaagtaatatacaagacatgacaaatcgagctatccaatttaaaaagtaatgttagtcaataagattgaaaaatgttataatgatgttcatgataatcattatcaattgggatgtctttgaaaattgataatttaaaaatagaaattattttttataaacagaaagaattttattgaaagtagggaaattatgaatcgtttgcatggacaacaagttaaaattggttacggggataacacgattataaataaattagatgttgaaataccagatggcaaagtgacgtcaatcattggtcctaacggctgcgggaaatctactttgctaaaggcattgtcacgtttattggcagttaaagaaggcgaagtatttttagatggtgaaaatattcatacacaatctacgaaagagattgcaaaaaaaatagccattttacctcaatcacctgaagtagcagatggcttaactgttggggaattagtttcatatggtcgttttccacatcaaaaaggatttggtagattaactgctgaggataagaaagaaattgattgggcaatggaagttacaggaactgatacattccgacaccgttcaatcaatgatttaagtggtggtcaaagacaacgtgtttggattgcaatggcattagcacaaagaactgatattatctttttagacgaaccaacaacatatttagatatctgtcatcaattagaaatactagaattagttcagaagctaaatcaggaacaaggttgtacaattgtcatggttcttcatgatatcaaccaagcgattcgtttctcagatcatcttattgcgatgaaagaaggggatatcatcgctacaggttcaacagaagacgtattaacacaggaaatattagaaaaagtttttaatattgatgttgttttaagtaaagatcctaaaactggaaaacctttactggtaacttatgacttatgtcgcagagcttattcttaattaagtaagttaatatgataaaaaggacaattaacatgacaaatagagagaacccaacgccattgaagtttttatcctatattataggtttaagtatgatactactaatcacactatttatttctacattaataggtgacgccaaaattcaagcctctacaattatagaggctatttttaattataatcctagcaatcaacagcaaaacatcatcaatgagattaggattcccagaaatatagcagcagtaattgtaggtatggcgcttgcagtttctggtgcgattatacaaggtgttactcgtaatggtcttgctgatccggcgctcataggtttaaattcaggtgcttcatttgctttagcattaacatatgcagttttaccaaacacttcatttttaatattgatgtttgctggatttttaggtgctattctaggaggtgctattgtattaatgataggccgatctagacgtgatggatttaatccgatgcgtattattttagcgggtgcagcagtaagtgctatgttaacagcgctaagtcaaggtattgcattagcttttagactaaatcaaacagtaacattttggactgctggaggcgtttcaggcacaacatggtcacaccttaagtgggcaattccattaattggtattgcgttattcattatattaacaattagtaaacaacttaccattttaaatcttggtgaatcattagctaaaggtttaggtcaaaatgtaacaatgatcagaggcatatgtttaattattgctatgattctagcaggtattgcagttgctatcgctggacaagttgcatttgtaggtttgatggtacctcatatagcaagatttttaattggaactgattatgctaaaattctaccattaacagccttgttaggtgggatactcgtgcttgttgccgatgtgatagcacgatatttaggagaagcgcctgttggtgcaatcatttcatttatcggtgttccttactttttatatttagttaaaaaaggaggacgctcaatatgattagttcaaataataaacgcagacaattgatagcactggctgtttttagcattctactatttctaggttgtacttggagtattacctcaggtgaatacaacatacctgttgaaagatttttcaaaactttaattggacaaggtgatgccattgataagttaatcttattagatttcaggttacctcggatgatgattactattttggctggcgcagcgcttagtattagtggtgcaatagtgcaaagtgtcacaaaaaatccaatagctgaaccaggtatattaggtattaacgcaggtggcggatttgcaatcgcattatttattgcaattggtaaaattaatgctgacaactttgtttatgtactgccgttaataagtatactaggtggtatcaccactgcattgattatttttattttcagttttaataaaaatgaaggtgttacacctgcgagtatggtattaataggtgtaggtttacaaacagcattatatggtggctcaattacaattatgtcaaaatttgatgataagcaatctgatttcatcgctgcttggtttgcaggtaatatttggggtgacgaatggccatttgtcattgcatttttaccgtgggtgttgattattattccttacttactatttaaatcgaatacactaaatattattcatacgggtgataatattgcacgaggtctaggtgtaaggttaagcagagaacgtttaatattattctttatcgcagtgatgttatcatctgctgctgtagcagtagcaggttcaatttcgtttatcggattaatgggtccgcatattgccaaacgtatcgttggaccacgtcaccagttgtttttaccaattgccattttagtaggggcatgtttacttgttatagctgatacaattggcaaaattgtattacaaccaggtggggttccagcaggtattgtcgtagcaattattggtgcaccgtatttcttatatttaatgtacaaaacgaaaaatgtatagtgtcaatggacacaacttattgctatgaaaggcactttattataaggcttttcatagcattttttatttaatgagccactcaagactatttattttttcaataatgaaccattaagttatcaagaggatcttatcaaaaatatatttgataacggtatcaggttaattctttatgatagcgcattcatttattctgttttatactatgactgataataccaaggaggtacaacatgatgaaaaagttaatcaataaaaaagaaacatttttaactgatatgcttgaaggattgttaattgcgcacccagagttagatctgattgctaatacagttattgtaaaaaaagctaagaaagaacatggtgtagcaatagtctctggaggtggaagcggacatgaacctgcgcatgccggttttgttgcagaaggtatgctagatgcagcggtttgtggcgaagtatttacatcacctacacctgataaaatattagaagctattaaagcagtagatactggtgatggtgtattactagttgtaaaaaactatgcaggtgacgtgatgaatttcgaaatggcacaagagcttgcagaaatggaaggtataaatgttcaaactgttattgttcgtgacgacattgctgtgacaaacgaagtacaacgtcgtggtgttgcaggaacagtgtttgttcataagcttgccggttatcttgctgaaaaaggttattcattaacagagataaaatcgcgtgtagaagcgttgttacctgaaattaaaagtattggtatggcaattgagccaccgcttgttccaactactggaaaatatggctttgatattgaagacgacaaaatggaaatcggtattggtatacatggtgaaaaaggtattcatagggaagaagtaaaggatattgatcatattgttggaacattgttagacgaattgtataaagaagttactgccaatgatgtcatattaatggtaaatggtatgggtggtacgccgttatctgaattaaatatcgtaactaaatatattcaacaaaatttagctgcaagaacggttaatgttgctaaatggtttgttggtgattatatgacatctttagacatgcaaggtttttctataactatcgtgcctaataaaccagaatatttggaagcatttttagcaccaacaacaagtcaatactttaaataagaagtgaatatgaataaatatacatttatgaggtggcacaaatgaaagtgaatgatatgaaagcacgtttattaaatttagaagaaacgtttaaaaaacatgaatctgaattaactgaattagatcgagcaattggtgatggtgaccacggggttaacatggttcgtgggtttagtagtcttaaagacaaacttgatgatagctcaatgcaatcattgttcaaatcaactggtatggcattgatgtcaaatgttgggggtgcatcaggaccactgtatggctttagctttgttaaaatgtctgcagtcaccaaagatgatatggataatcaagatttcattacactaattcaggcatttgccgaagcggttgaatcacgtggtaaagttactttaaatgaaaagacaatgtatgatgtagtagcgcgagcagcagagaagcttaaaaatggtgaaactttaacattcaatgatttacagcaattagcagataatacaaaagatatggtagcaacgaaaggtagagctgcatattttggagaagaatcaaaaggttatattgatccaggtgctcaaagtatggtttatattttaaacgctttgattggagatgaagataatgcctaaaattatacttgttagccacagtaaagaaattgcaagtggtacaaaatctttgttaaagcaaatggcaggtgacgttgatattataccaatcgggggattaccagatggttcaattggaacttcatttgatatcatccaagaagttttgactaaattagaggatgatgcattgtgtttttacgatattggatcttcagaaatgaatgtagatatggcaattgaaatgtatgatggtaatcatcgtgtgttaaaagttgatgcaccaattgttgaaggcagttttatcgcagcagtaaagctatcaatcggcggttcaattgatgatgcattagcagaaatcaaacaatcattttagttaaaatttactaataatgaaaaatgtaaacctttttcaaatgaaactttataaaaaatatgatagtatatatgtaaatgtttaataaaatctggagaaataggaggacattgccatgcaacaccttataaaaaaacatgtattgaatggcgagtttgatttagtacgacaattgatgtccgaaacagattttatggaatttgaagaagcatatatttcaagtgcgcatgaagtagaaagtatgatgttttatacatgtattttagatatgattaagtacgaagaatcatctgaaatgcatgacttagcatttttattgcttgtgtatccactaagtgaatatgaaggtgctttggattctgcttattatcatgcagacgcttccataaaacttactgacggcaaagaagttaaaagtttgttacaaatgttattattgcatgcgataccaacacctgttatttcagataagaaggcttttgatatcgccaagcaaattttaaaattagatcctaataataatgttgctcgtaacgtcttaaaagacactgccaaacgtatggacaacgttgttgttgatataaatgaattacaccaacgtaatgcacgttaattacatttcaattatattagcttaataatagttttaacatttggttgggttgggcatatgttccagccttttttaatacttaaaaactaacgaagtatacttgtgtgcacaaatggtttttatacaacattttataaatttatacattttaataaagaacatacgatagatggtttaaaccttgttaactgagaaattttgatatgtattcttcgaaatttaactaaatatacgaaattcaagaagcacaataattaatcatttttcctatacaaaagttcgtatgactgcattataaaagcataaatttataatttttttaaatgtcattgaacgtgataatgtgaatggattgagcaattttgaaaaagtgaaaaataacctatgcggcttgcaattaattttcagtacgttataatgcacactgtgcaaaattaaggaggtctattattcacatgatgatgaataaagaagcaacaaaaattggatttgcctacgtcggcattgtagtgggcgcaggattttcaactggacaagaagttatgcaatttttcactaaatatggcttgtgggcttatttaggtgttattatatctggttttattttagcttttattgggcgccaagtagcaaaaattggtactgcctttgaagcgacaaatcatgaatcaacattacaatacgtattcggtgaaaagtttagtaaagtctttgattatattttaatcttcttcttatttggtatagctgtaaccatgatagctggtgcaggcgcaacatttgaagaaagttataacatacctacatggctaggtgctttaattatgacattagcgatttatattacgttgctattagactttaataaaatagtacgtgcactaggtatcgttacaccatttttaattgttttagttgtattaatcgctggcgtttatttatttaaaggtcatgtttcattagcagaagttaaccaagtagtgcctgaagcaagtatttggaagggaatctggtttggtacaatatatggtggattagctttttctgtaggttttagtaccatcgtagcaatcggtggggatactgaaaagcgtacagtgtcaggtgcaggcgcgatgtatggtggtattatctatactgtattactagcattgatcaactttgcattgcaaagtgaatatccaactattaaaaatgcctcaattcctacattgacgttagcaaataatatccatcctttaatagcaacagtgttatctgttattatgctggcggttatgtataatactattctaggactaatgtattcatttgcagcacgttttacagaaccatacagtaaaaattatcatatctttattattataatgatggtagcaggttatttattaagtttcgtaggatttgctgaattaattaataagttatatacaattatgggatatgtaggcttatttattgtagtagctgtaattattaaatatttcaaacgtaaaaatgcggataaaaaacatattgcttaatatcatatgagggatatccgaaactttacaattgaatcactttgttttaaccttaaaagcaattcgtctctactcttatcgggcgaattgctttttatatttattcagtctattaatatgagcgtctaacaaatagagaggtacgatgtaatgaataaagataataaatggacgatgataactgcgctttttataactgtaatcagtgtattgttagcatttcatctgaaacaacattatgaccaaattacaaatgagaaccatgctaataaagacaaaattaatattaaaaataaaaatgtgcgcatttatcaaaaccttacatacaatagagttttccctaacagtaaattagatattattacacctgttgatatgtcttctaatgccaaactgccagttattttttggatgcacggtggtggttatattgcgggtgataagcagtataaaaacccattattagcgaaaattgctgaacaagggtacattgttgtgaatgtaaattatgcattggcgccacaatataaatatcccacaccattaattcaaatgaatcaagcaactcaattcattaaagaaaataaaatgaatttacctattgattttaatcaagtaattattggcggtgattctgcaggtgctcaattagctagccaatttacggcaatacagacgaatgatcgcttaagagaagccatgaaatttgatcagtcattcaaaccatcgcaaattaaaggtgctatactatttggtggtttttataatatgcaaacagttagagaaactgagtttccaagaatacagttatttatgaaaagttatactggcgaagaagattgggaaaagagttttaaaaacatttcacaaatgtcgacagtaaaacaatcgacaaaaaattatccaccaacatttttatctgttggagatagcgatccattcgaaagtcaaaatatagaattcagtaagaaattacaagaattgaatgtaccagtagatactttgttttatgatggtacgcatcatttacatcatcagtatcaatttcaccttaataaacctgaatcgatagataatatcaaaaaagtgttacttttcttaagtcgtaatacatcctctagtggtattcaaactgaagagaaaccacaaatagaaaatccgagtaatgaattaccgttaaatcctttaaactaatgataaacagtagtaatttattgcttaagcaacatttaagattttcaaattaaaaacgaagaatttaaaacatgtggtgctaatgtgtaagagtctgagatataataaattgttagcggttctttatcatttctatctcactctattatgatgtgacatttattttacaaactaatttgttttgaacctgaaaataactttttacaactaaattgtcgaaaaacagtgtgtacatgatataataaatttataaattgaaaagaattcaaaagaaaaattaaaatatagattgagcacgaagtgatttgaaataaggttgtgaaagggaatgacaaggtcagcattaaaaccatttaaaaataaacgcgttatggttactggacgtatacaacgtgttttgtttaaaaattatttagatagacatagcacatttaagccgaatgtaaggatattattaaaagatgtatttgtttcaggtgtatcaatagatcatttatggttatatgagacaaataaatactatgcattggcaatggaacttattcatcaacgagtaaaatttagtgcgaatgttgtaccgtattacaaaataaatagaaataataatttattcgtacaagattatggaattaagcgtaaaggtaggttaattactgaagaagcttacaatcaaaacaatcagtatcaggataagatatatgaaaaattaccggatatagattttagactcgaagatttttatagtaaggaaaactaaacaacatatataaagcaccactaatcgtagttgatagttaatcaattacacattagtggtgttttattttgaatttaaatttgataaatgaataagagtgtacgtatttatttgagattagataacattgataagtatgagtaatgtattaggtaaccattaaattcgttgttatacgattctgatacaagattatgataaaatagctttaattaagaattttagccatcatatagtcatcataatatttaccatcgataaataacttatcttttaaaacgccttcgatttgaaaatcggcacttttaaaaagctcgagggcaggttggttattgagtggtacatttgcttcaattcggtgtatttgattgtttaaacaccaagccataatggcatcaagaagtgcttggccaattccacgatgttgatataatttctttacacctaaatcaattttagcaacatgtttaatgcgttgaaatggtgtcgtattaacaaaggcaaagccaacgagttgttcatcactttcagcaacgaagatgactttatgcggagaagtgatatattcttctaattgtttactagccgatgtgacgctaggatcatattctcctggtgtgtagaacatatacggagattcgtcgtatatgttcgctaacattgaaatgaaattttctacatctttgatactaactctacgtataatatgggccataaaaagcctccagtattttgaaattttaaaacatttgctactattataatatatatgtaactaaaaggtggagtaatatgttttttggttacagtttaaaggagtattttagatgaaacctaaagttttattagcaggtggaacaggatatattggtaagtatttaagtgaagtgattgaaaatgatgctgaactttttgctatatcaaaatatccagacaataaaaaaacagatgatgttgaaatgacttggattcagtgtgatatatttcattacgaacaggttgttgcagcaatgaatcaaatagatattgctgtattctttatcgacccaacaaagaattctgccaaaataacacaatcatcagcaagagatttaacattaatcgcagcagataattttggtcgagcagcggctatcaatcaagtaaaaaaagtaatctacatacctgggagtcgttatgataatgaaacaattgaacgcctaggtgcatatggtacacctgtagaaacaacaaatttagtttttaaacgttctttagttaatgtagaattacaagtttcaaagtatgatgatgttagatcaacgatgaaggtagttttaccaaagggatggacattaaagaacgttgtaaaccattttattgcatggatgggttacactaaaggaacttttgtgaaaacagaaaaatcacatgatcaatttaagatatatattaagaataaggtgcgaccgctcgcagtatttaaaatagaagaaacagctgatggaataataactttaattttattgagtggaagtttagtgaaaaaatatacagttaatcaagggaagttagaatttagattaatcaaagagtcggcagtcgtttatatacatctatacgattatatccctcgattattttggccgatttattactttatacaagcaccaatgcaaaaaatgatgattcatggctttgaagttgactgccggattaaagattttcaaagtcgattaaaatcaggagaaaatatgaaatatactaaatgatattgggtgatatggatgcaaatactactagtagaagatgacaatactttgtttcaagaattgaaaaaagaattagaacaatgggattttaatgttgctggtattgaagatttcggcaaagtaatggatacatttgaaagttttaatcctgaaattgttatattggatgttcaattacctaaatatgatgggttttattggtgcagaaaaatgagagaagtttccaacgtaccaatattatttttatcatctcgtgataatccaatggatcaagtgatgagtatggaacttggcgcagatgattatatgcaaaaaccgttctataccaatgtattaattgctaaattacaagcgatttatcgtcgtgtctatgagtttacagctgaagaaaaacgtacattgacttggcaagatgctgtcgttgatctatcaaaagatagtatacaaaaaggtgatcagacgattttcctgtccaaaacagaaatgattatattagaaattcttattaccaaaaaaaatcaaatcgtttcgagagatacaattatcactgcattatgggatgatgaagcatttgttagtgataatacgttaacagtaaatgtgaatcgtttacgaaaaaaattatctgaaattagtatggatagtgcaatcgaaacaaaagtaggaaaaggatatatggctcatgaataatttgaaatgggtagcttattttttgaaatctcgcatgaactggatattttggatattgtttttaaacttccttatgttaggcattagtctaatcgattatgattttccaatagacagtttattttatattgtttctttgaatttaagtttaacaatgatttttcttttattgacatattttaaagaagtaaaattatataagcattttgacaaagataaagaaatagaagaaattaaacataaagatttagcggaaacgccatttcaacgtcatacagttgattatttatatcgtcaaatctcagcgcacaaagaaaaggttgttgagcaacagttgcaattgaacatgcatgaacaaaccattacagaatttgtgcacgacataaaaacacctgtgacagctatgaaattattaattgatcaagaaaaaaatcaagaaagaaaacaagcattactatatgaatggtctcgtataaactcgatgctagatacacagctgtatattactagattagaatctcaacgtaaagatatgtattttgattacgtgtcacttaaacgcatggtcattgatgaaatacaattaacaagacatattagtcaggttaaaggtattggttttgatgttgactttaaagtggatgattatgtttatacagatataaaatggtgtcgtatgattattagacaaattttgtcaaacgcattgaaatatagtgagaattttaatattgaaattgggacagaattaaatgatcaacatgtttcgttatatattaaagactatggcagaggtattagtaaaaaagatatgccgcgaatatttgaacgaggatttacgtcaacggctaacagaaatgaaacgacgtcttcaggtatgggtctatatttagtaaatagtgtaaaggatcaattaggtattcacctgcaagtcacgtcgactgttggtaaggggacaactgtcagattgattttcccattacaaaatgaaattgttgaacgcatgtcggaagtgacaaatttgtcattttaaacatgcgttttgttacttagaattgatacatcaatgcagcttcaacgttataataagatagatgttagtcatatgttaaattgaagatacaagtgccaaagcctaaaggaaatgaagttaagataaattataggagtgttaaagtggcaattttagaagtaaaacaattaacaaaaatatatggaactaaaaaaatggcacaagaagtgttgcgagatatcaatatgtctattgaagaaggcgagtttattgctattatgggtccctctggatctgggaaaacgacattattaaatgttttaagttcaattgattatatttcacaaggttctattacattaaaaggaaaaaaattagaaaagctttcaaacaaggaattatctgatatacgcaagcatgatattggttttatttttcaagagtataatttactgcatacattgactgttaaagaaaacataatgttaccactaacggtacagaagttagataaagaacatatgttaaatcgttatgaaaaagtagcagaagcattaaatatattggatattagtgataaatatccctctgaattgtctggtggacaaaggcaacgaacatcagctgccagagcatttataacattgccttctattatatttgctgacgaaccaacaggtgcattggattctaaaagtactcaagatttattaaaacgattaacaagaatgaatgaagcatttaagtctacaattattatggtaacgcatgatcctgttgcagcaagctatgcaaatcgagtagtgatgctaaaagatggtcaaattttcactgaattataccaaggggatgacgataaacatacctttttcaaagaaataatacgtgtacaaagtgttttaggtggcgttaattatgacctttaacgagataatatttaaaaatttccgtcaaaatttatcacattatgccatctatcttttttcgttaattacgagtgtagtattgtattttagctttgtagcattaaaatacgctcataaactaaacatgacagagtcatatccaattataaaggaaggctcacaagtcggaagctactttctatttttcatcataattgcatttttgttatatgccaatgtgttatttattaaacgacgaagttatgagcttgcattatatcaaacattaggtttatctaaattcaacattatttatatactaatgctcgaacaattactaatatttataattacggcaatattaggtattattattggtatttttggttcgaaactgttattaatgattgtctttacattattaggaattaaagaaaaggttccaattatttttagtttgagggcggtatttgaaacattaatgttaatcggtgtcgcttattttttaacatctgctcaaaattttatattagtgttcaaacaatctatttcacagatgtcaaagaataaccaggttaaagaaacaaatcataataaaattacatttgaagaggttgttttaggcatcttaggtatagtattgattaccacaggatactatctatctttgaacattgttcaatattatgattctatcggtacacttatgtttattttattgtcaactgtgattggggcatacttattttttaaaagctctgtttctctagtttttaaaatggtgaagaagtttagaaaaggtgttataagtgtaaatgatgtcatgttctcatcatctattatgtatcgtattaagaaaaatgctttttcacttacggtcatggcaatcatttcagcgattactgtttcagttctttgctttgctgctataagtagagcgtccttatcaagtgaaataaaatatactgcaccacacgacgttacaattaaagaccaacaaaaagctaatcaattagcaagtgaattaaacaatcaaaaaattcctcatttttataattataaagaagtaattcatacgaaattgtataaagataatttatttgatgtaaaagcgaaagaaccatacaatgtaacaattactagtgataaatacatccctaatactgatttgaaacgtgggcaagctgatttatttgtagcggaaggttctatcaaagatttagtgaaacataagaagcatggtaaggcaattataggaacgaaaaaacatcatgttaatattaagttacgtaaagatattaataaaatctattttatgacagatgttgatttaggtggaccaacgtttgtcttaaatgacaaagactatcaagaaataagaaagtatacaaaggcaaagcatatcgtctctcaatttggattcgatttgaaacataaaaaagatgctttagcattagaaaaagcgaaaaataaagttgataaatctattgaaacaagaagtgaagcgataagctcaatatcaagtttaaccggaatattattatttgtaacatcatttttaggtattacattcttgattgctgtatgttgcattatatacataaagcaaatagatgaaaccgaagatgagttagagaattatagtattttgagaaagcttggatttacacaaaaagatatggcaaggggactaaagtttaaaattatgtttaattttgggttacctttagttattgcactatcacatgcatattttacatcattagcatatatgaaattaatgggtacaacgaatcaaataccggttttcatagtaatgggattatacatttgtatgtatgctgtttttgcagtgacggcttataatcattccaagcgaacaattagacattccatataaaatatacagatggctttcagtagagtagtggattcggattcacgaactatactggaagctttttattataaatgaagagaagttatatttttagcatgtatagttgaatactgggttaaaataccatattaataatgaagtaaaggtatgagtgattatgaaagtgttttgaatgaaatatatttaattggtgatgcttttaattgaaaagattaacaggattcaactttgtaaattgtattaaatgtgagaaaataaaagtatattcattgagagatatatgagtcaatgatcgttttaaacaagataagtgtattttaatatgtaaaagttatgtaataaatattgtatcgttgcaaatttcccaactatatccatttacaatttttagagttgtatagataaaaaattgcctatacaataactttttcaaaacaaatgcctactactatttaaattttatgtaaaagttaagtttcggaattgttaaaaatttgtaaattgaattgtgggattgtaaattttgtgctattttcatataagggcaaatacagtaaattgtttactgtgaggcatttttgaaattaatatcagtacactaaaattatactgacgattgataataacaaatttgtatcattagtttgtaaattcacttgtcttaatttgaaacaaattataactgaatgtgattggtgacaatcgcttaaatggaggattttaaatgtttagtaagaaaaaagataagtttatggttcaattagaagagatggttttcaatctggatcgtgctgctattgaattcggtaaaatggatttcaatacacatttagatttaaaagcatactcagacaacattaaaacttatgagtcacatggtgacgaattagtacatcaagtaattactgatttaaatcaaacatttatcacaccaattgaacgtgaagatattttatcattatgtgatgcaattgatgatgttttagatgcaattgaagaaacggcagctatgtttgaaatgtattcaatcgaatacacagatgaatatatggctgagtttgttgataacattcaaaaagcagttgcagaaatgaaacttgctgtcggcttattagtcgataaaaaattatcatatatgcgtattcattcaattaatattaaagaatttgaaacaaactgtgatggtattttaagacagtcaattaaacatattttcaatagcgaaacagatccaatcactttaattaaaataaaagatatttatgaaagcatggaagaaatcgctgataaatgtcaaatcgtagcaaataattttgaaactattattatgaaaaatagctaaggggagtatatatttatgtcatatataatcatcgtcactatagctgtagttattttctcgctgatatttgactttatcaatggattccatgatacagccaatgcagtagctactgctgtatctactagagcgttaacgcctaaaacggcaattttaatggcagcagtgatgaactttataggtgctttaacatttacgggcgttgcaggcaccattactaaagacattgtcgatccatttaaattggaaaatggattagttgttgtgttagctgcaatacttgcggctattatttggaatttagctacttggttttacggaattccaagttcgtcttcacatgcacttataggttcaattgcgggtgcagcaatcgcatctgaaggctcatttggagtgttacattaccaaggtttcacaaaaattattattgtattaatcgtttcaccgattatcgcattttgtgttggtttcttgatgtattcaatttttaaagttatctttaaaaatgcaaatttaacaagagcgaatcgtaactttagatttttccaaattttcacagcagcgttacaatcattctctcacggtacgaatgatgcgcaaaaatcaatgggtattattacgttggcattgattgtcgctaatgtacagaatgatggcagtgttgaaccacagttatgggtaaaatttgcctgtgcgacagcaatggggcttggtactgcaattggtggctggaaaattatcaaaactgtaggtggtaatattatgaaaatacgtccagcaaatggtgctgcggccgatttatcatctgcattaacaatttttgttgcatcatcgctacatttcccattatcaacaactcacgttgtgtcatcatcaatcttaggtgttggtgcttctaaccgagctaaaggtgtaaaatggagcactgcgcaacgaatgatcattacatgggtgattacattacctatttcagcattgttagcaggtttactattctatatacttaacttatttttctaattgaaaataaaactaaactgaacttcagtatcacaaacatatggtggtattgaagttcagttttttatgtaagtagataacatattttatagaatttacgtagaatgaccaagacaaagcattttaattaggaggctatattataaatgtattccatggaacataatcagttaggtcattaaaatatatgtaagagcaaaataatgatttaatagtttatattcttcaatgaaggaataattaaatagttatcaacttgtttaattaacctaaattgtattgggctttatttaatataaatttgtatatgtagacgaaaaagcgtaaaatactggtataacaaattaaatcattatatagtcaacttagttgcattattttgatttttaatatattatgcatttaatttaatcaaataggtaggttgttaatttttacctaactaccattcatacaaaatataaatatgtatgatagggaagggtgagataattttttgtaccaaaatgaaaatttttttcaaaaataaaaaactagcaatctcacatgatgtgaattgctagtatatatcagtacaatttatttaattaatggatgaatgcatagctagaaacttctgaagctggaattgtacggtagttcatattgtatggaccatatgtgtaattcatttcagaaatcaagatactaccatcaccattgacacgttcaacataagcaacatgaccatatggaccaggtgtgctttgcataattgaaccaactgatggtgtgttgtttacttggtaaccatcattagctgcgttaccagcccaatacttagcgtctgaccaatatgtgctaattggactaccagcttgagcacgacggtcaaatacgtaccatgtacattgaccagcagtgtataaattttggtgattaaaagatgatgcattgccattgctacctgttgtagctgttggtgttgtaccacctgatccaccattaggaatttgtaatgtttggttaggcataattaaataaccacgtaagttattggctgccattaattgatcaactgaaacaccatatctgctagcaatgatatttaatgattcaccagcttgtacagtatgagatgatgctgaaccagcttgtggagaagtgtttgacgtattttgtgcatcacttccacctactgagataacttgaccagggaataccaagttgttatctaattggttattttgtttaatactctctactgaagtgttgtatttttgagcaatactccataatgattcaccagattgtactgtatgttgtgtagaagcttgtgcatcatgatgcgttaaaaatgcagctgcaccagatgttgctgttattgcaaatgctaattttttcaaagggactcctccttaaaattatgttttactacttttaaaaattattaagacaatttatatagtaaattaagttttcgttttatattacgatttccatattatcaaaaataagtagctttgtgtggtttgttattatcttgtaatattattaacattttaggatatcggttcatatttttataaatgctgatttgatagtgtataaaagcgttttagtgattttaactaattataaaaaattatattttgtaacattgtaaaatgtaaaattactatacttgttaaaggttatttcttttgatgaagcaaaatttactgtaaaatttgacgcataaaacgacggtagaaggaggaattattttgtcgcaaaatacaaatcattcatattatcatcaaaaccagcatgctcaatcaataagtaaagtgtggctttattttatgtattattggattatatttggcataggatgctatctaggtcagtttttaccattaagttggcgacaacccttgtcatttggattactgattattattttagcaacacttgtttttgaaagagcgagacggttcggtttaattatttcacatatttacgctgtagtgattggcttattgtcatacgcaacgtttaccacgtatttacaaaatttaggaccagatattttctataaaaatatcgcattagcaatttttgcatttatagcatttggtattattggttatttcttcgttggagatgcatcgagtataggcaaatatttattcgttacattaataacattaattattgcgagtctaattggtatttttcttcaaaatcctattttttacactattattaccgtcgttagtctgttgttatttctactttatactttgtatgattttaatcgtttaaaaagaggtgactattcaccaagagaaatgggatttaatctatttattaatttgttgaatattattaaggatatactttaccttgctaatatgttcagaagataaacagttaaattaataaagaaatttgtataaagttttggaataatcaataatgaatatcaaccttaaactggagcgattgtcataagttagaaacttagactgagattttactgataaagcaataaaaatatattaccttaattgtaaagatattattaatcattgaaatgattaactgctatagttctaaagtaaacaaatcttagaagataaactttaaacaggtgtacttgcctttctaattacacttttattagaaaagtaaagtatagctacgtattaattttaaaatcgaaacattaataggaagaagtatagataatataaacaatttaatgttagtttgagctcatctcaaaagtagaatgtgatttaaataagtgtttatttttaaattgaaaatgaatatataactaacaaaagataatagtaatacgttgtagatgtggtcatttaaaattattttgaaaatactaaaaagtagtgtgttttcaattggatagtttaattaaactgactacatctatttttgtaatatttaaatgattgatatataagtttaaaaattaaccattatatagttttatttatttttgatttggtattcgtattgtgttaaatttacgtttaattaaataagttaaatattatagggaatgataaaagtggtacttaaatatagaaagaggtaaagttatggcaaaatcatgcttgcatatacttactaataatgaatatgcgacaacgcgttgccaagatggcatagtcttattttggccaattgacggggaaatcgaactacaaaaatttcgtaaaagtaaaataattgaagatgatatatatattattaatcatctggatgtatttagtattaagaataataaaaaaacgatcatgttgtatttgagtagcgattggtttgcggaattaggctttactttctttaattaccactatacagcaaagttgattaaatcatcctataatttgaaatgtctactattaaaattgacatatcgataccttgataatcagcctcttaatgacgctgatattagaaaattacaggatattattaaaatcattgcaaaagaagcaagtatggataaaaagattgcacaaaatcaatatcgatatgcgtattatggtgatttgcgtgatgagctcgaatatatttatcaaaatgtaaatcaacgattgacattaaaaagtgtcgctgataaattatttgtctcaaagtcaaatttgtcatcacaattccacttacttatgggcatgggttttaaaaaatatattgatactttgaaaattggtaaatcgattgaaattctacttactactgatagtactattagcaacataagtgaacatttaggttttagtagtagctccacttactctaaaatgtttaaaagttatatggatataacaccgaatgaatatcgtaatttatcaaaatataataaatgtttaatgctaaagccagaaccactagtaggcaaaatggtgcaagaagtaaaagaaatcatattgaattatattgaacattataaaaaccacctaactgatgttatacatattgatgaagacaaatttgaaacacctaaattgtttcaaacggttattcaaataaatacttatacagaaatgaaattagttttcttagaaggaatctttaaaaccttattgaataagaacagtcaagttgtctttttcatcatgccatcgattctaaaaagtaaaaataccatgtccgaagaagaaaaattcacaatcattaaaacaataattgaaagtgatctaaagatagcatttaatataaataatattgaaacaacttattttgttgaagaagcttttatgagtgttttcagacaaatatctccaaacgaattaagtaatcataataattacgaagtgcattttgtttttgatttatcattgatggaaattagaacaatttatcgaatgatattaaaattacataacatcatgttgaatgtgaaattaggattgaacattacctgtttatttgaaaaaccttcagtttttaaatcactagtatcacaaataaagcgacttaaattcgattcgttaataatagataatgcaaatttaagtagcccttatttgatgggggaaagtgatgagttactattgaaaaatattttgcattttaaaaatttaaaacaagtaattaatgaattggatattgaacaagaaaagctgatttttctaaatgttgaaaatcataaactgcttaataataaagaacgagatctaagtaatagtgctccattaatttataagacattaagtgcgctgtatcacaactttgatggctttggattaaacatttttgacaatcatcaagcatttaatgcgatgcatctatatgacaaaaatggatttaaaacaacactaggtcttatattagaaaagtttatcgaatatgtctcgaaaccaaaatacgaaaacagttattattctatttttgatatagagaattattattgtcttgttatttatgattggcgagtgatagagagcgagacaattatgagtaattttgaggatagtcaagtttatataaattttaaaaacaatgttttaaacgataaatatctaattgtaatagaaacattggacaaaatagtggcaacattaatcatttgatttctaaagaattaagagataaatatgaatggaaccctagtttactatctaaaattgacaactaccttaaaccagcaatagagattaaagagcataattttagtgataattccttgaatattaacgttacttttaatgcgttatacataattaaaataggaaaaaaataacaccttgatatgtattgcaaaatttaatttgcatttgttggtaattttgacaacgtattaaaaacaaatgagaaagacaatggctgaaaaatttaagataataatgacagaagcattgtctttatatatttgggggtgcaacattttgaatactgagaaattagaaacattgcttggcttctataaacaatataaagcattatctgaatatattgataaaaaatataagttgtcgctaaatgatttagcagtcttagatttaacgatgaagcattgcaaagatgaaaaagtacttatgcaatcatttttaaaaactgcaatggatgagctagatttaagtaggacaaaattattagtttctataagaagactaattgaaaaagaaagacttagtaaagttagatcatctaaagatgagcgtaaaatttatatttatttaaataatgatgatatatctaaatttaatgctttatttgaagatgtagaacaatttttaaatatttaattgaaattgagtgtcgaaagcatagaatttgcttatcggcacatttttaatttatacatattttaaaactaagtaacagtttgaagaaatcgtagttcaataatgttaattgtgaaaatgtatataaacataaaaaaatcatgtataatatatgttgttaattaaacagttcgaaagcgagatgacattatgggacgtaaatggaataacattaaagaaaaaaaggcccaaaaagataaaaacacaagtagaatatatgcgaaatttggtaaggagatttatgttgcagcaaaatctggtgaacccaatccagaatctaaccaagctttaaggttggtgcttgaacgcgctaagacatattcagtgccgaatcatattattgaaaaagcaatagataaagctaagggtgctggagacgaaaactttgatcacctaagatatgaaggatttggcccaagcggatcaatgctaattgttgatgcgttaacaaataatgtaaatcgtactgcctctgatgtgcgagctgcttttggtaaaaacggcggtaatatgggtgtatctggatcagttgcttatatgtttgatcatgtggcaacatttggtattgaaggaaagtctgttgacgaaatacttgaaacattaatggaacaagatgtagatgtaaatgatgtgattgacgataatggattgacaatagtctatgctgaaccagatcaatttgcagtcgttcaagatgcgcttcgtgcagcaggtgttgaagaatttaaagttgctgaatttgaaatgttacctcaaacagatattgaactttctgaagcggaccaagtaacatttgaaaaattaatcgatgcattagaagatttagaagatgtacaaaacgtattccataatgtggatttgaaataatgaaatcagcagaacaatggattgatgaattgcaacttgaatcacatcctgaaggtggtttctatagagagacaattcgagaagtattgaaagatggacgcagagcgccgtttagtagtatttattttttacttacagatgacaatatttcgcattttcatcgaattgatgctgatgaagtatggtactatcatgctggcgattctctaacaattcatatgataaatccggatggggaatatacgactgcaacattgggtactgatatccaaaatggagatgtattgcaatatgtagtgcctaaaggaacaatttttgcttcttcaatcgaaatatcaaatacttttagtttagtaggttgtatgtgtcaaccggcatttgagtttaagcagtttgaattgtttaagcaatctgaattaattacgcaatatccgcatcttaaatcagtaatcgaaaaatatgctttaaaataaaagtgatcaatgaagtggtttgaaggttgttaataaacctttgagtcacttcatttttatatgtattcttgattgaatcagaatagatttgatgcttcagctgtttttaatgaaaatagcattaaatgattttgaaaacgataagagtgtgttatttatatttttgaaaaatcacttttatgaagaaatgtgtgtactatctaattaatattgtctattttaagtaaattgaagcgagttgtagtaaaataataataaatattttcatatgattaacaaaaactataaaactgtatcatgacatgacatcatttatgtagttttatataataatgacaaggagttggtgactgtgaaagtaaagtatatagataaacgtcactggcgtcgcctaattgatagggaatacacagaggtaaaagttaataataataggtttaagggtattataggcttagtcacgatgaaaaaggttcgtgatcctttagaggtgacggtagttggacaaaatatcattgtcgcagatgacaattataaatggttgcaaatactacctgaaaagaaacgttatagtataactgtaatgtttgataataaaggcaatccattagaatattattttgatataaatatcaaaaatataacgcaaaaaggtaatgcgcgtacagtagatttatgtttagatgttttagcattaccaagtggtgaatatgagttggtagatgaagatgatttaatgtttgcattagaaagtgagcaaattacaaaaaagcaatttcatgaagcatatatgattgcacatcaaattatggcagagttagaaaatgattttaaaggattccaaaagaaaatcatgtactgctttaataaaattaatgcaaaggctcaaaaaaatcatcaaaagccacaaaataaaactaatattgaaaaaagcaaacaaataaagcctaagcaatataatcaaactaaaaatcaccaacaacaaaagaaaaactaagtaattcaagctgcagccataccaataaaattggtgaaattattcgttagtaatgaactcatgaatgcttgtagccatgaaagttcaataattgaataatttatggggggaaattatgaagattgaagactatcgtttactaataacattagacgaaacgaaaacgttacgtaaagcggctgaaattttatatatatctcaacctgctgttacacaaagactaaaagctattgaaaatgcttttggagtagatatttttatcagaacaaaaaaacaattgattacaacaactgaaggaacaatgattattgagcatgctcgtgacatgttgaaaagagagcgattattttttgacaaaatgcaggcacatattggtgaagtgaatggaacaatatcaatcgggtgttcttctttgattggacaaaccttacttcctgaagttttgagcctatataatgcccaatttcctaatgttgaaatacaagtgcaagttggttcaactgaacaaattaaagcaaatcatagagattatcatgttatgataactcgtggaaataaggtaatgaatttagctaacacacatttatttaatgatgatcattattttatttttccaaaaaatagacgagatgatgttacaaagttaccatttatagagtttcaagctgatccgatttatataaatcaaataaaagaatggtataacgataatttagaacaagattaccatgcaactattacagtggatcaagtagcaacttgcaaagaaatgttgattagtggtgtaggtgttacaatcttgccagaaattatgatgaaaaatatcagcaaagaacaatttgagtttgaaaaagtagaaattgataatgaaccgctgattcgttcgacatttatgagttatgatccgagcatgttgcaattgccacaagttgattcttttgtaaatctcatggcgagctttgttgaacaaccaaaggcgtagttttagactaatttaaggtttgtatttaattttaaactattcggttaaattgaacgtagttggttgctaatgcaccaacagcaaaagagcccctaattaataaattaaaaggggacaaaggaatacagttggatgctaacgcaccaactgcataagagcccctaattaataaattaaaaggggctctaagaagcggggttatggatatgtttgcagcgttattacaaataaagaattataaactctttgttgctaatatgtttctactaggtatgggtattgcggttacggtcccatatcttgttctttttgcaactaaagatttaggtatgacaacaaatcagtatggattacttctagcatctgcagcgattagccagtttacagtaaattcaattattgctagattttcggatacgcatcactttaatagaaaaattattattattctcgcattattaatgggtgcgcttggtttttcaatatacttttttgtagatacaatctggttattcatattactatatgcgattttccaaggattatttgcaccagcaatgccccaactttacgcatctgctagagaatctatcaatgtttcaagctctaaagatagagctcaatttgccaacacagtattacgttcaatgttctcattgggctttttatttggtccatttattggtgcccaattaatcggattaaaaggctatgctggattgtttggtggaacaataagtatcattttatttactttagtacttcaagtgtttttctataaggatttaaacattaaacaccctattagtacgcaacaacatgttgaaaaaattgctcctaatatgtttaaagacaaaacgcttttattaccatttattgcatttattttattacacattggacaatggatgtatacgatgaatatgcctttatttgttactgattatttaaaagaaaatgaacaacatgtcggttatttagctagtttatgtgctggtttagaagtgccatttatgatcattcttggcgttttatcatctagattacagactcgaacattgttgatttatggagcgatttttggtggtttattctacttcagcattggggtatttaaaaacttctatatgatgttagcaggacaggtgtttttagctattttcttagcggttcttttaggaattggtattagttatttccaagatatcttaccagattttccaggatacgcttcaacactattttctaatgcaatggttattggacagttaggcggtaacctattaggtggtgctatgagtcactgggtaggtttggaaaatgtattttttgtatcagcagcatcaatcatgttaggtatgatacttatattctttactaaaaatcaaaaaattacaaaagaggatgtgatatcaacatgacaattattttatggctacttatcatcgctgccttcatgttagcatttgttgggttgattaagccgattattccttctgttttagtattatgggttggctttttaatctatcaatttggctttcataatcagcatttatcatgggtgttttatgtatctatggcattgctaacaatattaattttatgtgccgactttttagctaataaatattttgtgaatcgcttcggtggttctaagtttggagagtatgcagctttaattggtgtggttattggatgttttgttttaccgccatttggaattattattataccttttattttggtattcatagttgaattaatacaaggctattcatttgaaagagcagttaaagtaagtataggttcaatcgtagcatttttaacaagtagtatagctcaagcaatcattatgtttataatgattgtatggttctttatagatgctttattgattaattaataaaaagcttattgcaaaatatgtttttcggtaactgtaatttagtgattttatcattaacagtaccaaattcgcatatgatgtaataagctttttgtttataaaaatgtatgagaatgttttttcgaaatatttctttcaatgcgtaatccaataggcataactataaatgaaaatataataaatacccaattgcttacctgaatatatggtccaaaggcaagtaatgattgtggaataaagaatacatagaaaaatcctacaattagtagaatgattgctaaataggtgaatatccatatccaatttgaattgttaaaacactgcagttgtattgttttaaaactaaaccatataaataaaaagacaataaagaatccaacgactactgaaaacgggaatgaaacaaaatataaattacttccatttttttccatgaaaaatcctaaaaatcctttgagaaaactaacaatcccaattaatagaacgatgtgttgatagatatatttaaaaatatttttaaatgtttcattaggcatcgcttttagttcttttattgcatgtgcttttgggtcgtgattgaaaaaatctaaggctaataaaccatgttgttctgcgcttaataattgtttgagtatacggttaataattaactctgtatcatgagggttgacgcgaaagtcagagcgcatataagtcatataattctcgaagatttctctatcagtattgcttaatcttaatgatttaacattattttcttttgttaattgcgcagtacttttcattgttacttaagcgctcctttaaaaatgtttaattccaaattaaaatggaaatgattttatagtattaataaggtcaatcatatcatattaaacgcataaatataacgattaatattggagaggaaaatgaggacacttaataaagatgaacataattatatcaagcaaatagctaatatacatgagacattattgtcgcaagtagaatccaactataaatgtactaaactgagtattgctcttaggtacgagatgatatgttcaagattagaacatacaaatgataaaatttatatatatgaaaatgaaggtcaattaatagcgtttatttggggacattttagtaatgaaaaaagtatggttaacattgaactgctatatgttgaaccacaatttcgcaaactgggaatagctacgcaactgaagattgcgcttgaaaaatgggcaaaaactatgaatgcaaagcgaataagcaatacaattcataaaaataatttgccaatgatatctttgaataaagatttaggttatcaagtgagtcatgtgaaaatgtataaagatattgattagaattaggattatgttgctaattcatgttaaaattaaaaaagatttaatgacgttaaggagttttatatgaagaaattaatcatcagtattatggcggtcatgctatttttaacaggttgtggtaaaagtcaagagaaagccactctggaaaaggatatcgataatttacaaaaagaaaataaagaattaaaagacaaaaaagaaaagcttcaacaagaaaaagaaaaattagcagataagcaaaaagaccttgaaaaagaagtgaaagatttaaaaccttcaaaagaagataacaaggatgataaaaaagacgaagacaaaaataaagacaaagataaagataaagaggcatcacaagataagcaatcaaaagatcaaactaagtcatcggataaagataatcacaaaaagcctacatcagcagataaagatcaaaaagctaatgacaaacaccaatcataatcgaattgcttacttgttatagatgaaaggtacagcgttttaaaccttattttaagggtatgtattaattaaaatgtggtcatgattgaaacagaacgtaaaaatagacaacgtaattaataaaggagagaaacggcatgcatgaacaagattttagaattttagagggtcaagatattactttgccagaattaggtagagaattagaaaatattacaggacatacgattgctgattctactggcgaaattaagcgtgtaattgcacatttaccaaactttgagtccgatacagatacttttgttgctacatatcgtttaaaccatcaacaagattttatagatgcaacttttactgcgctgaaatcagatagagcacgtttaaaagaagtgccagttcatgttgaacttataagttatatttctaaatcaaaataaactgctatctaaaacgcaaagttgatcaaaatatcgattttgtgttttttattgagaaattatataggagtgtcaatcgatgatttattgtgaaacagagcgtttaatattaagagactggcatgaagatgatctgttaccttttcaaaaaatgaatgcgaattatgacgtacgtaaatattttccaagtttattgagttatcgtcgttcagaattagatatgagaactatggatgcggttattaaagattatggcattggattatttgctgtagaagataaagagtcccatcaatggataggctttataggtttgaattatattccagaaacaagcgattatccatttaaagaattaccgctttatgaaataggttggcgcttgttgccagaattttggggaaaaggattagcaactgaaggcgcaaaggcaacattgaagttagcagaagaacatcaaatatacgatgtctatagttttacagcagaagcaaataaagcttcacaacgtgtaatggaaaaaattggcatgacagtgtatgatcatttcgaattacccaatctaagtaagtatcatttattaaaaaggcaagtgcgctattacattaatcttcgaaagtgaaaaatttatacataagcgtaacaaacacccctaacattgtttagctgatgataacaatattaggggtgtttgtttattttttaaccttagaatgattaatcgtatgaacgagtacccagaggtttgaaatttaatattgattcaattaatgattccttagtgtcgcataacggtgcaagagcacgatacttaggatcaataaaaccttcctcaatcatatggtcaatcattgtttgtagtggattgaaaaagccattaatattataaatggcaataggcttttcatggatacctatttgagcccaactatacatttcgaaaaattcttctagtgaacctgcgccaccaggagccatgacaaatgcatctgcaagttctgccattttatttttacgttcatgcatagaatcaactaaaattaattcagttaaacgttggcttgtgatttcatgttcatctaacattttaggcatgacgccaatagctttgccgccatgatctaatacaccatcttgaatggcacccataatgccaattgaccctgcaccaaatactaattcataaccttgttcagcaaaatatttacctaaatcgtatgctttttgtacatatgaagggtcatgacctttgcttgcaccacaataaactgcgattcgtttcatgttaatccagctccttaattcgatgaatgacttttaatagtgattgttcaaacactttttgatcttgctttgtaaaaggtgggggacctttgtggcgaccaccttgttttctaatttgtgcattcatatatcgtttatctaatagttgttgaatatttttggaattgtatatcttcccattatgatgcatgacaattaagactttgtcgactaataaacttgcgagtccataatcttgagtgactacgatatcatccttcgttgataattgaacaattttgtaatcaactgcatctggtccatcatcaacatataatgttgatacatgtggaggatataattggttcgaaaaatggctgaagctccgaataattgtcacaaaaatgcctgtctcagttgttaaatctataatagaatcaacaacaggacaagcatctccatcaataataatatgtgtcacaattatgcctctgtattgttttctttattttgttgagaggcgcttttggcaacataatctttatattttttaaatgacttgatgcgtgctttatcagcttcttgttggcgtttttgttcttctttgtgtcgtttttcaatatttttttgtaactttttattcattttagcgatttctttgcgatttttttcagctagtttatcgccttttttctcagttttctcatctaatttattaggtgttaagcctgctttttcttcgtatttttgtgattttttcatatctttaatacgttgtatttcattcttttcgcgggctttttgctcttctttatgacgcttttcgatatttttttgaagtattttattcattttatcagcgtctttacgattttgtttagctaatttttcgccttttttctcaatataggcaggatcatgttctctagcaaactttttaagttcacgtttattttcaaaatcttgttttttatcgccgacatattctttaacatcactcgctgtgttactgattgctgcagatgtttttgaagcaactttacttgtagcatctgtaactttttgtacgtccggatgttgtttgatacgtttacgttcaacaattaacggtaccaatacaattggtaatacattaatcataaatttgatgacttttttcttatccatagatcttgcctccataattactttattaattttacataccctatgatacatcaatataaacgatgatagtagtgaatcactattaagtatttcagatgttttttaaaagaagacaataaaaactgccaatcaagtgattccttaattgacagtctatattttaaaaggaaattaaatacctttaccaatgccaaatccgaagtaaagtatagcaataaagattactaatacaattctgtaaatggcaaatggaattagtttgattttgttaattagatgcaagaatgttttgattgcaattagtccaacagtaaatgcagctaaaaagcctaaaatataaaaaggtatatcagcaatctgaatatcttgataatgttttaataaagataaaccactagctgctaacataattggaacagccataataaatgtaaagtccgatgctgctttatgatttaatttcattaataccccagttgaaattgttgagcctgaacggctgaaaccaggccacatagctactgcttgagaaataccaattacaaatgcttggaaataactgatttgatctactgtttgtgggtttttaactttagctgagtatttatcagcaataatcatatagatagcacctacgaataagccaatcataacagttggcacactaaataaatgttcttcgatgaaatcatcaaatagtaagcctaaaatacctgctggcaccatacccactaatacatgtaataaatttaaacgtcttggctttgaacgtctttgttgatcgttatctccttcaacatgtttgtgtttaccaatatgtaaaatctctaagaagcgttcgcggaacacccatgctgctgcaaagacggatcctaattggatgacgattttaaatgtaaatgctgactgagaacctaaaaattcagatgattttaaccacatatcatcaactaggatcatatgtccagtagaggaaacaggtgcaaattctgttaatccttcgacgacccctaagataataccttttattaattcaatgataaacataatgtacccactttcattactcaatttaatttatttaaatatcaaaattaccatatcatgatagcatattcatttaaagacatgctagttataatactagactaaagatgtatatattcattttcttttacatgtaaaactacaatattttattgagctatttaatttgattttaaggaaaaccttttataataggtttaggtgatataattgtgaaaaaattaacaacaatactgtttcaatataaaatttttccggtactcatgttcttggtcagtactggtctcggcataatcgttataacgcaaaatattttaatagcagattttttagctaaaattataagacatcaatttcaaggtttatggattgtattatttattttattaggtgttttacttttaagagcaactgtgcaatttctaaatcaatggttaggtgatacattagcatttaaagttaagcatatgcttagacagcgggttatttataaaaataatggtcatccaatcggtgaacaaatgactatactcacagaaaacattgatggtctagcacctttttataagagttatttgcctcaagtgttcaaatcaatgatggttccgctcatcataatcattgcaatgtttttcatccatttcaataccgcattaattatgttaataactgcaccatttattcctttgttttatattattttcggtttgaaaacgcgagatgagtcaaaagatcaaatgacttatttgaatcaatttagtcaacggtttttaaatattgctaaaggtttagtgacgttaaagctatttaatcgtacagagcaaacagagaagcatatttacgacgatagtactcagtttagaactttaacaatgcgcattttacgcagtgcttttttatcgggattaatgctcgaatttataagtatgttaggtattggattggttgcattggaagcaacgctaagcttagtagtatttcataatattgattttaaaactgcggcaattgcgattattttagcgcctgaattttataatgcaattaaggacttagggcaagcgttccatactggaaaacaaagtgaaggtgccagtgacgttgtgtttgagtttttagaacaaccgaactataataatgaatttctattaaagtatgaggaaaaccaaaagccatttattcagttaacagacatatcatttcgatatgatgattctgatagattggtattaaatgatttaaatttggaaatatttaaaggtgatcaaattgcacttgtaggtccaagcggggcaggtaaatccactttgacacatcttattgcaggtgtttatcagccaacaataggtactataagtacaaaccagcgtgatttaaatataggaatacttagtcaacagccatatattttcagtgcttctataaaagagaatattacgatgtttaaagatatagaaaataatactattgaagaagtgctagacgaagtaggtttattagacaaagtgcaatctttcacaaaaggcattaacacaataataggtgaaggaggcgaaatgttatctggtggacagatgagacgcatagaactttgccgtcttttagttatgaagccagatctcgttatatttgatgagcctgcaactggtttagatattcaaacagaacacatgattcagaacgttctgtttcaacattttaaagatacaacgatgattgtcattgcacatagagataatacaattcgccatttacaacgacgcttgtatatagaaaatggaagactgattgctgatgatcgcaatatttcagtaaatataacagaaaatggtgatgacttatgaaaacacgactaaaatttcaagtagataaggatttattgttagctatagttgttggtgtttgtggaagtttagttgcgctcgccatgtttttcttaagtggttatatggtgacacaaagtgcacttggtgcgccactatacgctctgatgattttagtcgttacagtaaaattgtttgggtttttaagagctattactcgatacgtagagcgccttatttctcataaagctacatttacaatgctacgtgatattcgggtacagtttttcggtaaattagtaaatgtcattcctaatgtttaccgtaaactgagttctagtgatttaatttcacgtatgattagtcgtgttgaggcattacaaaatatatatttacgtgtttattatccaccagtcgtcatcggtttgacagcgctagttacagtcatagttttggcgttcatttcaatcggccatgcgctattgattatggttagcatgttgttcactttactcattgttccttggttaagctcaaaaaaagcacgtactttaaagaaacatgcagctaatgaacaggcccgatttttaaatcatttttatgattataaagctggtatggatgaactacgtcgatttaatcaaattaatcattatcgagataatttgatggctaaattaaatcattttgataaattacaacttaaagagcaacgctttttaacgatttatgattttatattaaatattattgctatgctttcgatttttggtagtttagttctaggattaattcaaattaatgcaggccaactaaatattatttatatgacgagtatagttttaatggtcttaactttatttgaacaagctgtaccaatgacaaatgtcgcgtattataaagcggatactgaccaagcattgcacgatattaatgaagtgatatctgtaccttctactaatggaaaaaaacgtcttaatgataagtatgatgcaacgaacatttatgaagttaaggatgctagttttaagtattggaatcagcaaacgtatgtgttgtcggatattaattttaatgttaatagaggcgaaaagattgcgattgtgggtccttctggttcaggaaaaagtacattactacaaattatggcagggttatatcaattagatagtggctctgttcgtttcgaaaatatggatatgtttgaaatagatgacaaagataagtttgaatcgttaaatgtcttgctacaatctcaacaattatttgatggtacaatacgtcaaaatttatttaccgatgaaaaagatgaagcggtgcaagcaatatttaagcaattagatttagaacatttggcactagaacgtcaaattgacttagatggtcatacattatctggcggagaaattcagcgtttagcgattacgaggatgttattaaaagatactgcatcaacatggattttagatgaaccaacaactgcattagataaacaaaatagtttaaaagttatggatttaattgaagcacatgcagaaacattaattgttgctacacacgatttaactttattgtcacgttttgagaccatcattgtgatgataaatggtaaaatagttgaaaagggaaactatcaacaattactagctaatcaaggtgctttatggaatatgattcaatataatgcataaaaaaactgcttgataggctaagaaacctttcaagcagttttttaactaacaagcttacgcgtgctaattgtttttctattcttaataaattctaaacattactttaattgtcatgacaaaagttaattatttttcctttgtttcatcaaatgcatgaatgactttacctaataagcgattaagttctttaacttcatcttgcgataaagaagaagctgaagcgactttgtcagatgcattacttaattctggtctaatagtttcacttttgtcagtcaagtgaataaatacttcacgttgatcgacttcggaacgttcacgcttaattaagtctacttgttccattcgttttaataatggtgatactgtaccagtatcgagtgctaattcagttacgactttcttgacgtttacaggagattcatcccataaaattgttaagacaagaaattgtgggtatgttagattgtacttcttaaaaactttgttagagtagtagcgattaacttgtctttgagcattgtacaaactaaagcatagctgttcttttaaattatgttgatcagacattaaagttctcctccagacatactatccgtttttttctcttttcggattggtaatcattaaaaagttgattgtttattaattcacaactttctttgattcaatgccatgctaaaattaaagtatgtttaaagtttagaagatatttttgattaaatcaagcaaaaagataatttaatatatatgttatcatttttaaaaataactgtaatagaaaagagaatataaaatgaaaaataataaagatgaaaaaataagaatatccataattaacggatttttgggtagtggtaaaaccacgttactgacacattatattagtgaattattaaaaaatgatgagaaaattaaaatcatcatgaatgaattcggtacttttgatattgatagcaatagtatttcaaatgaaattgaagtccattcattgattaatggttgtgtttgttgcgatcttaaacaagaacttgtctatgaactaaaagccattgctttaaaaggggacgttaatcatgtcatcatagaagcgacaggcattgcgcatcctttggaattactagttgcatgtcaagatccgcaaatcgttaatttctttgaaaagccgattatttatggtgtattagatgcgactcgatttttagaacgtcatcaatataccgaaaatacagtttcgctgatggaagatcagttgaaactaagtgacatgattattattaataaaattgatcttataactgatgacagtcttgagaaaattgataagcaattaggtatgatttgtgcaagtattccaacttataaaacaacctatggaaaagtttcgttggaagaattggacttaactgttaaagacagagagatatcgtctcatcatcaccatcatcatgggattaaaagtatgacttacacgtttacaggtccgattgatcgtcatttgttttatcaatttataatgaaattaccggaatctgttctacgtttgaaaggttatgtgtcatttagagatcaaccaaatgcaatttatgaatttcaatatgcatatggtttaccagactatggaataattggcatgcaattaccattaacgattgttattattggtgaaactttagatacaaatcacatacgtaatcaattggatatgctacaatttacgtaaatcagaaaatgtgttgtttcaatttaacggaaatagcacattaatttcttaatacttttattgtgaatattttgtgacattgagggatggagtggatgagatatggaacaaataatgattaatcactatgttcatttttctaggcttgtacaaggtttttggcgtgcaaatgaatggaagatgactgcgaaagagttaaattattttataaatgaattagttgaacgtggaattacaacgatggatcatgctgatatttatggagattatcaatgtgaatcactgtttggtaatgctttggatttatcacccgaattaagaaataaaattcaaattgttacgaaatgtggtatcattttgccttctaagcaatttgattttacaaatggacatcgttatgatttgagtagtaagcacatcgtgaaatctgttgaacagtcattaatcaatttgaatgtagattatttagatagtctactcattcatcgtccttcaccattgatggatccagaacaagttgctgatgcattaactaaacttgttaaacaaggtaagttgaagtcattcggggtgtcgaattttaatcattcacaataccaattgttaaatcaatatattatgaaagaaagactacatattagcatcaatcaattagaattatcgccatatcacgttgatagtttacaagatggaacaatggattcaatgtatcaaaaccatgttcaaatcatggcttggagtccttttgcaggcggtaaaattttcgacaaggaagatattaaagcgcaacgtattatgaaagttgttcaatcaatagctgacaaatatggtgtgagtgacacagctgtgatgatagcgtggttagtaaaaataccgcatcgtatcatgccgatacttggaacaagtcagttaaagcgtattgatcaagcaatcgaagggctacaacttaatttagatgatcagtcgtggtttgacatttacaccgctattatcgtacaagatattccgtaaacttatttacttttaaatcataaaggagcatatcatgacaaacgaagataaacgtttcgaacaattaagatttgaacgcaaatttatagttattccgtatttaatttatgcagtcattgtattactattaaatattttctattctgatttgaaaataacaatgacattattcggacttttctttgcgtataatgtagtcattttgttcatagcatttgttaaacattataaacgcacattgttactaagtcttatattaacagtgcttagtggcgcggcattctttggaattatttatgtttatggcattaatcatttttaaacattaaaaagagactatctacaataatctcatttgcattttatctaactaagtttaacttttgcttagaaaaatgatgctatgaggatattcagtagatagtttttttatgatctaatatttaaacttagatatcgttttgtaattaaccgagataactcatcacctagcaatattatttacaaaatatttcgataaaattgtgtattttgcataaattaaaaatgtatgttttaaaaaattgttataattaaattaagattaaacaaaggggtgactgttatgtcagaagaaaaacatgtagttgaacatgaacaacaaaagaaagaaaagacaaaaaagcaatacaagccattttggattgtcatgagttttataatacttatagttgtactattactcccggcaccttcaagtctgccgataatggctaaggcagtactagctattttagcttttgcagttattatgtgggtaacggaagctgtatcatatccggtgtcagcaactttaattattggcttaatgatattacttttaggatttagccctgttcaaaatttaggggagaagctaggtaatccgaaaagtggcagtgctattttagctggaagtgaccttctaggaactaatcatgcattatcattagcgtttagtggatttgcaacttcagctgtagctctcgttgcagctgcattatttttggctgctgctatgcaagaaacgaatttgcataaaagactagctcttttagtgttatcaattgttggtaataaaactagaaatatagttattggagcaattatcgtttcaattgtacttgcatttttcgttccttctgcaacagctagagcaggggcagttgtaccaatcttgctgggtatgattgcggcatttaaagtttccaaagatagcaagttagcgtctttattaataattacttcagtacaagctgtgtcaatttggaatattggtatcaaaacggcggcagcacaaaatatcgtagcgattaattttataaaccatcaattaggatttgatgtttcatggggcgagtggttcttatatgcagcgccttggtccatagttatgtccgtagctttatatttcatcatgattaaagtgatgcctccagaaattaatacaatagaaggtggtaaagatttaataaaagaagaattgcataaacttggccccgttagcccacgtgaatggcgtttaattgttatatcgatgttattattactgttttggtcaactgaaaaagtattacatccgattgactctgcatccattactattattgctttaggtgttatgttaatgccgaaaattggtgtcatgacatggaaacatgttgaaaataaaataccatggggaacaattatcgtgtttggtgtaggtatttcactaggtaacgttcttttgaaaacaggtgcagctcaatggttaagtgatcaaacttttggtgttttaggtttaaaacatttacctattatcgcgacaattgcgcttatcacgctttttaatatattgattcatttgggctttgcgagtgcaacaagtttatcatcagcgttaatacctgtttttatttcgctaacctctacgttacacttaggagaccagtctataggatttgttttaattcaacaatttgttattagttttggtttcttattacctgttagtgcacctcaaaatatgttggcttatggcactggtacttttacggttaaagatttcttgaaggcaggtataccattgacaattgtagggtatattctagtgatagtttttagcatgacttattggaaatggttaggtttgctttaattaaaaatataaataagaatctaggttattttaaagtgacaaaaagcttaataaaataaaaagataattgaagggtgttttgtttatggcaattgctgtgttattaaatcgaatgtttcgaatggaacacaatccattatttgaatatatttatcaacaaaaagaagacattgatgcatgttattttatcattccggaagaggacatgtcttcagcttctgatttgaaagcacagttttatcgcggtactttgcagcgcttttaccaatcgttgcacgcagaaaagcttacaccttatgttatgtcttatgacgatatcatttcattttgtaaagaaaacaatatctctgaagtagtgactgcgggtgatattatgagttatcatcttgaagaatatgatattttacatcaacgttctttattcaatgaagcacgcattgccgttactttgatacgtgggaatcattactttaaagcgagtaaaacaatgaatcaacaaggggagccatacaatgtttttactagtttctataaaaaatggcgaccttacttgaggcatagagacgtatatcactatgatttaaaatcattcgaagactttgtcattgcatcacctgatgatttagtgtttgatgacatagcatttggatcctcacaaataattgaacagaataaatggcaacattttttagatcaagatatacagaattacgaaagcggaagagactatttacctgaagtattaacaagtcagctaagtgttgctttagcatatggattattagatattattgaaatttttaatgatttattggcgcgttatgatgaagatgaggcaaactatgaagcatttatacgtgaactcatttttagagaattttattatgtgttaatgacacagtatcctgaaacctcataccaagctttcaaacctaaatatcgacagataaaatggtcgcaaaatgaagcggattttaatgcatggtgcgaagggcaaacaggatttccaatcattgatgcagcaataatggaattgacacaaactggttttatgcataatcgaatgagaatggttgtgtcgcaatttttaaccaaagatttatttatagattggacatggggagaaaaattctttagaaagcaccttattgactatgatgcagcatcaaatattcatggatggcaatggtctgcttctacaggtacggatgcagtgccgtattttagaatgtttaatccaataagacagagtgaacgctttgatgctaaagctttgtatatcaaaacatatcttccgatttttaatcaaattgatgcaaaatatttgcatgatacacaacgcaatgagtccaacctttttgaacaggggattgaattaggtagtcattatccaagacaaatggtagatcatcaagaaaaacgtacacaagttttagctacatttaaagcgctagactaattcggctcaattgatagatctggcatgagtaaaatctggagcagaatataaagttcttaagcaatataaataagccaatttctattattgatgtgatagaaattggctttcctcaaatatataagttgtatttagttttcttattaatttgatgttatcttagtatgtccgtaaataaagtgaggtatagtacgacatactctaaaaacgtagcgagataaatatatttcaatctaacttttatgttttgaggcacttgccatttaggatattgtcgttcgtaatacgacacttgttgtataaatacacctagtccaaatggcagcatcatgagtaagatacttcttaaataacttaaaccaatatcatgccatatgtgtccaataatcaattgaaagacaatgatagatactattaaaacgattatatttattgtcacttgttcaaacgcactccttttccaaataatagaattgctgcttgcatgacaaccataaaacatacaaacatagcagttttaagcgttagactttctagaatgtgatttagaacatgtaagggctcattaaagaaataaacggaatgtaagcgtaagaaacgaccaatataaattccgaatccatttaaaaacattagcacgacaacaattaatctattaagccaacggtgagaagtcaatgttagtatttcaaaatagattaaaatcatcacataaaccgctaagaagacaccaagcagtaaataggtaaagtatttccactcacttaaatttagtcctgcgtaaaagttgaattgaaattggttcaaatggattaaatcagttaccatataaaatgtatttggtaaaagtaacacaaatataaaactatatatgataaagagtggccattcatactttttattcggtttgaataatcgtaataatagactaagctcaaaaggtatatatgctaaaaacaaatttaaagtcataaattgaaaaattttagtctcaaaaagggagacgataaataaaattaaaaagtaaattctagcgatgtatcgagattgcatcaataataaacactactttctaatgaaaaagttattcattcaaatgtgatagttataaacgcattcaattcctaattaaaaatttaatttaactcgttgaagtatattaataaacgagaatgcatttatgattaagcacttatgataacttgtaataaaatttgattcaactaaaaagtaaagtgctattgaggatcaagtaaatttaaaccgactgcatctttgaatgaacgttgaatgtccaaatcagttacagtaagaatgatttcagcagttgcagaaacaattgctttagcgagatgtccgctaaaagtttcatatgattgagtaccgaaagtagcatgcaaatgtgcaaaatgaccattgtctagacgagaaatattacctaataagctcgtcaattccagtggctcagtaatatgtttttcttcgtattgtttcgttgttaaattgaaaaattttaatacaacgtcatcacatgcaccaatgccgctgacagatgtaaatgttaagtcttggtcatctgcaaaggttgttatacattcaacgatatcttctcctttttccaacactagtagtatagtatgattacttttttgcaatttcatatgatcaatcccctttattttaatatgtcattaattatacaattaaatggaaaatagtgataattacaaagaaaaaatattgtcaaatgtagcaatgttgtaatacaatatagaaactttttacgaatatttagcatgaattgcaatctgtcgtggaaaagaagaataacagctttaagcatgacatggagaaaaaagaggtgagcatatgaataaacagatttttgtcttatattttaatattttcttgatttttttaggtatcggtttagtaataccagtcttgcctgtttatttaaaagatttgggattaactggtagtgatttaggattactagttgctgcttttgcgttatctcaaatgattatatcgccgtttggtggtacgctagctgacaaattagggaagaaattaattatatgtataggattaattttgttttcagtgtcagaatttatgtttgcagttggccacaatttttcggtattgatgttatcgagagtgattggtggtatgagtgctggtatggtaatgcctggtgtgacaggtttaatagctgacatttcaccaagccatcaaaaagcaaaaaactttggctacatgtcagcgattatcaattctggattcattttaggaccagggattggtggatttatggcagaagtttcacatcgtatgccattttactttgcaggagcattaggtattctagcatttataatgtcaattgtattgattcacgatccgaaaaagtctacgacaagtggtttccaaaagttagagccacaattgctaacgaaaattaactggaaagtgtttattacaccagttattttaacacttgtattatcgtttggtttatctgcatttgaaacattgtattcactatacacagctgacaaggtaaattattcacctaaagatatttcgattgctattacgggtggcggtatatttggggcacttttccaaatctatttcttcgataaatttatgaagtatttctcagagttaacatttatagcttggtcattattatattcagttgttgtcttaatattattagtttttgctaatgactattggtcaataatgttaatcagttttgttgtcttcataggttttgatatgatacgaccagccattacaaattatttttctaatattgctggagaaaggcaaggctttgcaggcggattgaactcgacattcactagtatgggtaatttcataggtcctttaatcgcaggtgcgttatttgatgtacacattgaagcaccaatttatatggctataggtgtttcattagcaggtgttgttattgttttaattgaaaagcaacatagagcaaaattgaaagaacaaaatatgtagcataagtattttggtgtatattgatataaagtaaagcgtaatattatgaatgattagcatcgtttttcttatgaattttattaagaaaattcgatgctttacatttaaaaagattcgattgactaaatgttttactctttatatttaaatgttatatgtaacaaaaaatgattttgagtaataaacatgttacaaatattacattctttttaaattgcaatccacatacctaattcattaacgttaatgtgttaagatgataaaaaatgagtaaggaaatgtgggtaaggggatgacagtaaaaaatttatttttaggctttgttgctgtaatattaaccgtttgtttaattggtttattaatattagcaacaaatgaagatgcgcttgctaaggtacataaaacaattaatacgcttaacgcgataaatgtatcaactgaagatacttataaaaagaaaatggatattctcaatattcatactgctaaagcatctgaagtgaatgaaaatgtgaaaaagcaaaatcattttaaacatcgtgtgaatgcaaataaatcaaattcttttaacgaacaagagtgccaagttattgctgatcgttatgcagataagcatatcaatgataattatggtttagaaagaatttctaagacaaatcatggatataattatgtgtattccaatgataattcaactagtaagcaacatgtaagtatttcaaatcaaggcataataacgaaataatagatggaacagtgtattctaattggatatactgtttttattttgcaataatttaatttaaaaaggtgaattcaacttataaaatgatgtaaatgttatgtcaaaatcaaccaatccgtaatgtattttaaaatgttaatatagttctgaagaagtataaatgaggtgttgaaatggctaaaaataagaaaacgaacgcgatgcgtatgcttgatcgtgcaaaaattaaatacgaagttcatagctttgaggtaccagaagaacatttatctggtcaagaagtcgcagaactcatacaagcaaatgttaaaacagtatttaaaacgcttgttctagaaaatacaaaacatgaacattttgtatttgttatcccagtaagtgaaactttagatatgaaaaaggcagctgctttggttggagagaagaaattgcagcttatgcctttagataatttgaaaaatgtaacgggatacattcgtggtgggtgttcgcctgttggtatgaaaacattgtttccaacagtcgttgacaaatcgtgtgaaaattatagtcatatcagtgtgagtggtgggcttcgaacaatgcaaatcacaatagctgttgaggatttgattacaataactaaaggcaaaattggagcagttatccatgaatgattaataacaacaaaaagtatggggcaagattaggagtgtgacagagatgaaatttttataaaattcatttctgccacactcctttttgattgaattagcattttacgatcataaacagtcattataattgagtatttgaacataaaaatgtaattttatcgtcacaatttgagtgtttgtgattgtttttggtaatttatgattgaaaagtgaaagcgtactcattataatacaaagtgagatggggtgatgatgataattactgaaaaaagacacgagttaatattagaagaactttcgcacaaagattttttgactttacaagaattaatagatcgaactggttgcagtgcttcaacaatacgaagagatttatctaaactacaacaattagggaaactgcaacgtgtgcatggtggtgcaatgttaaaagaaaatcgtatggttgaggcgaatttaactgaaaaattagcaacgaatcttgatgaaaagaaaatgattgctaaaatagcagctaatcaaatcaacgataatgaatgcttatttatcgatgctggttcatctacattggagctaattaaatatattcaagcgaaagatatcattgtggtaactaatggtttaacacatgtagaagctttacttaaaaaaggtattaaaacaattatgctaggtggtcaagttaaagaaaatacacttgctacgattggttctagtgctatggagatattaagacgatattgtttcgataaagcttttatcgggatgaatggattagatattgaacttggattaactactcccgatgagcaagaggcattagttaaacaaacagcaatgtcattagccaatcaatcatttgtacttatagatcattctaagtttaataaagtatattttgctcgtgtacctttgctagaaagtacgacaatcatcacatctgaaaaagcattaaatcaagaatcgttaaaagaataccaacaaaagtatcactttataggagggactttatgatttatacagtgactttcaatccttcaattgactatgtcatttttacgaatgattttaaaattgatggtttgaacagagcaacagcaacatataaattcgctggggggaaaggtattaatgtctcgcgcgtcttaaagacattggatgttgagtcaactgccttgggatttgcaggtggatttcctgggaaattcattatagatacattaaataacagtgcaattcaatcgaattttattgaagttgatgaagatacacgtattaatgtgaaattaaaaacaggacaagaaacagaaatcaatgcaccgggtcctcatataacgtcaacacaatttgaacaactgttacaacaaattaaaaatacaacaagcgaagatatagttattgttgctggaagtgtaccaagtagtattccaagcgatgcgtatgcgcaaattgcacaaattacagcacagacaggtgctaaattagtagtcgacgctgaaaaagaattggctgaaagcgttttaccatatcatccactatttattaaacctaataaagatgaattagaagtgatgtttaatacaacagtgaactcagacacagatgttattaaatatggtcgtttgttagttgataaaggtgcgcaatctgttattgtctcgcttggcggtgatggtgctatttatattgataaagaaatcagtattaaagcagttaatccacaagggaaagtggttaatacagttggctctggtgatagtacagttgcaggcatggtggctggaattgcttcaggtttaacgattgaaaaagcattccaacaagcagtcgcatgcggtactgccacggcatttgatgaggacttagcaacacgggacgctatagaaaaaataaaatcacaagttacgattagcgtacttgatggggagtgaaaataatgagagtaacagagttattaacaaaagatacaatagcaatggatttaatggcaaatgacaaaaatggtgttattgatgagttagtaaatcaattagacaaagcaggtaaattaagtgatgtcgcgtcatttaaggaagcgattcacaatcgagaatcacaaagtacaactggtatcggcgaaggtattgccattccacatgccaaagtggccgcagttaagtcaccagctattgcgtttggtaaatctaaagcaggcgtagattatcaaagtttggatatgcaaccagcacacttattctttatgattgcagcgccagaaggtggcgcccaaacacatctagatgctttagctaagttgtctggtattttaatggatgaaaatgtacgtgagaaattattacatgcttcatcacctgaagaagtactagcgatcatagatgaggctgatgatgaagtgacaaaagaagaagaggcagaagctgaagcacaacaagttgcaactgcagaacaatcatctaaacaatctaatgagccatatgtgttagcagtaactgcttgtccaacaggtattgcacacacatatatggcacgtgatgcattgaaaaagcaagcggataaaatgggtattaaaattaaagtagaaacgaatggttcaagcggcattaaaaaccatttaactgaacaagatattgaaaatgcaacaggtatcattgttgctgctgatgttcatgttgagacggatcgcttcgatggtaaaaatgtcgtagaagtaccagtagcagatggtattaaacgcccagaagaattaattaataaagcattagatacaagtcgtaaaccttttgttgcccgtgatggtcaaagaaaaggtaactcaaatgacagtcaagaaaaattaagcccaggtaaagcattctataaacacttaatgaacggtgtttctaacatgttgccacttgtaatatctggtggtattttaatggcaattgtatttttatttggagcaaattcatttaatccaaaaagctcagagtacaatgcgtttgcagagcagctttggaacattggtagtaaaagtgcattcgcgttaatcattccaattttatctggattcattgcacgtagtattgcggataaacctggtttcgcttcaggtcttgtaggtggtatgttagcaatttcaggtggttcaggatttattggtggtattattgcaggtttcttagcaggttacttaacacaaggtgttaaagccatgacacgtaagttaccacaagcattagagggattaaagccaacattaatttatccactattaacagtgacggctacaggcttattgatgatttatgcctttaatccaccagcatcttggttaaatcatttgttattagatggattaaacaatttatcaggttctaatattgtattattaggtttagttattggcgctatgatggcgattgatatgggcggtccattcaacaaagcggcatatgtttttgcaacaggtgcgttgattgaaggtaatgcagcaccaattacagctgcaatgattggtggtatgattccaccgttagcaattgcgacagcgatgttaatttttagacgtaaatttacaaaagaacaacgtggttcaattatccctaactatgtgatgggtatgtcatttattacagaaggtgcgattccatttgcagctgccgatccattacgtgttattccttcaatgatgattggttcaggtataggtggcgcaattgctttaggcttaggttcacgaattactgcgccacatggtggtattattgtaattgttggtactgatggtgcacacttacttcaaactcttattgcacttctagttggcacattagtttcagcattaatttacggtttaatcaaaccaaagttaactgaaacagaaatcgaagcttcaaaatcaatggacgagtagttttaatgatgtaaaatgattgttagcaaagagcttcatattaagttgtatgttcaatgaatatatgttagttttatatatcgtgttaacggtagcttatacaaagctgtaaaaacactttctattaattcagtttttatgaattgatatgaaagtgtttttatttttagataaatgaatgaagaaatagacaccacaaatgtatagacttttttaatattttgcaaaaagttatgccaaacgaagcagatatagtaaaatatgagtgtcttaaagtgaaaatttataaataaagaagggtttatacgtgtcagaattaattatatataacggcaaagtttatactgaagatggcaaaatcgataatggttacattcatgtgaaagatggacagattgttgcaattggagaagtggatgataaagcagcaattgataatgatacgacaaataaaattcaagtgattgatgctaaaggtcatcatgtattaccaggttttattgatatacatattcatggtggttatggtcaagatgcaatggatgggtcatacgatggcttaaaatatctatccgaaaatttgttgtctgaagggacgacatcatacttggccactacaatgacgcaatcgactgataaaatagataatgcacttacaaatattgctaaatatgaagcggagcaagatgttcacaatgcagcggaaattgtaggtatacatttagaaggaccatttatatctgaaaataaagttggtgctcaacatccgcaatacgttgtacgcccatttatcgataaaattaaacattttcaagagactgctaacggattaataaagattatgacgtttgcacctgaagttgaaggtgcaaaagaagcgcttgaaacgtataaagatgacattattttttcaattggtcatacagtagcaacatacgaagaagcagttgaagctgttgagcgaggagctaaacatgtcacgcatttatataatgcagcgacgccattccaacatagagaaccaggtgtttttggagcagcatggttgaatgatgctctacataccgaaatgattgttgatggcactcattctcatccggcatcggttgcaattgcttaccgtatgaaaggtaatgaacgtttttatttaattaccgatgcaatgcgtgcaaaaggtatgcctgaaggagaatatgatttgggtggacaaaaagtaactgttcaatcgcaacaagcacgtcttgcaaatggtgcgcttgctggtagtattttaaaaatgaatcatgggttacgtaacttaatatcatttacaggtgatacattagatcatttatggcgagtaacaagtttaaatcaagccattgcattaggtatcgatgatagaaaaggtagtattaaagtaaataaggatgcagatcttgttattctagatgatgatatgaatgtaaaatctacaataaaacaaggcaaggttcacacatttagctaataaataatcataattaaatgtatgcaatagatttaatctgttaacataagcactttatattatgataaaatagaagcaataacatttttttctgggggtgtctaaatgggaaggcgataacatgtagttgtaatttaagtcatagtgataaatttgaatgcgtgttacccatgagtgacacatataacatggaggtgaatccctagaaatagggaattaattggaaacttcgaccataattagtttgattatatttattctattaattgcattaaccactgtatttgttggttcagaatttgcattagtaaaaattagagcaacaagaattgaacagctagcagatgaaggaaataaacctgctaaaatagtaaaaaagatgattgctaatctagattattatctttctgcttgtcagttaggtataacagtaacatctttagggttaggttggcttggtgaaccaacgtttgaaaagctattacacccaatatttgaagcaatcaatttaccaactgcattaacgacgacgatttcgtttgcagtgtcatttataatcgttacgtatttgcatgtagtacttggtgaattagcgcctaaatctatagctattcaacatactgaaaagcttgctttagtatatgcaagaccattgttctatttcggtaacattatgaaaccattgatttggctgatgaatggttctgcacgtgttattattagaatgtttggtgtaaatcctgatgcccaaactgatgcaatgtcagaagaagaaatcaaaattattattaacaatagttataatggtggagaaatcaaccaaactgaattggcatatatgcaaaatatcttttcattcgatgaaagacatgcaaaagatataatggtacctagaactcaaatgattacactaaatgaaccttttaatgtagacgaattactagaaacaataaaagaacatcaatttacgcgttatccaattactgatgatggtgataaagaccacattaaaggatttattaacgtcaaagaatttttaactgaatacgcttctggaaaaacgattaaaatagcaaactatatacatgagttgccaatgatttcagagacaacacgtatcagtgatgcattaattagaatgcaacgtgaacatgtacatatgagtcttattatagatgaatatggtggaacggcaggtattttaacgatggaagatattttagaagaaatcgttggagaaattcgtgatgaatttgatgatgatgaagtgaatgatatcgttaaaattgataataagacattccaagtaaatggcagagtactattggatgatttaactgaagagttcggtatagaatttgatgactctgaggatattgatacgataggtggatggttacaatctcgtaataccaatttacaaaaagatgattacgtggatacaacttatgatcgctgggttgtttcagaaatcgataaccaccaaattatttgggtgatattaaactatgaatttaatgaagcgagacctactatcggacagtctgatgaagatgaaaaatcagaatagatattaatatataaaccaactaagaatgatttaattcatttttggttggttatttttttgactaaaattaatgaaaagtgaaaatagtattggaactcaatatctttaatgatttaatgaataatttttattgaaagcgataattcgtattaattgagtttgttgaaaaatttagggtaatgtaaagatataaaagatacatagattggagagatataaagatgttgaatgagatacaaatattaaataatggatacccgatgccttcagttgggttaggtgtttataaaatctctgacgaagatatgactaaagttgtaaatgctgcaattgacgcaggctatagagcgtttgatacagcatacttttatgataatgaggcttcactaggacgagcattaaaggataatggcgtcgatagagaagatttgtttataacaacgaagttatggaatgactatcaaggttatgagaaaacattcgaatatttcaacaaatcgattgaaaatttacaaactgattatcttgatttatttctaatacattggccttgtgaagcagatggtctatttttagaaacatataaagctatggaagaactttacgagcaaggtaaggtaaaagcaataggtgtatgtaattttaatgttcatcatctagaaaaattaatggctcaatcaagtatcaaaccaatggtgaatcaaattgaggtacatccatattttaaccaacaagaattacaagaattttgtgatcgtcacgatattaaagtgactgcatggatgcctttgatgagaaatagaggactactagacgaccctgtcattgttaaaattgctgaaaaatatcataaaacaccagcacaagttgtattacgttggcatttagcacacaatagaattattattccaaaatctcagacacctaaacgcattcaagaaaatatagatattttagattttaatttagaattaacagaagtagctgaaattgatgctttaaatagaaatgcaagacaaggtaaaaatccagatgatgtgaaaattggggatttaaaataactggatgttaaattttacgtttatgaatgccttttaatgtgtacattaaaataaatgagttggtttttactatttgataaaacaatactcaggtacattcaaaatcttttaaataaaaaggatggacatagatgaaaattagagtcgtcattccttgttttaatgaaggggaagtcattacacaaacacatcaacaattaactgaaatactttcacaagatagtagtgtgaaaggctatgattataatatgcttttcatagatgatggtagtacggataccactatagatgaaatgcaacatcttgccacaatagataggcatgtcagctttatttcttttagtagaaattttggaaaagaagcagctatgattgcaggttaccagcatagtactgaatttgatgcagtcatcatgatagattgtgatttgcaacatccacctgaatatattccgaaaatggttgaaggttttatggaaggctatgatcaagtgattgcaaagcgtgatagaagtggtgaaaattttagtcgcaaaacattaagccatttgtattataagttagttaattgctttgtagaagaagtacaatttgatgatggtgttggtgattttagacttttaagccaaagagctgttaaatccattgcatcacttgaagaatataatcgattttcaaaagggttatttgaatggataggctataatactaaagtgtttacgtatcaaaatgttgagagacaaaaaggggaatctaagtggtcctttaaaaagttatttaattatggtattgatggattgatttcctttaatagtaaacctttgagaatgatgatttatcttggcttgtttatcttttcaataagcgtgttatatattatctatttattcatcaatattatgatatctggtgttaatattccgggatatttttcaacgattgcagctattttattattaggcggcatacagttaatttcaattggtgttgtaggtgaatatattggcaggatatattatgaagttaaggcacgtcctaaatatattattcaagctacaaatctttcaagtcttgaaaatgatgagaaggatacccataaagtttattctaaataaacaaaaaaagaagccctcattaatgggagcttctttttagtctttgcattttattttataaataaatcggattatgacgtaatgtctaatttgtgtaatgttacagtcatcgtagttcctacatctatatcactgcttacactgatttttgcgttattttgttgcgcgagttcattagctatatataagcctaatccagaaccacccgtttttgtattacgagagttttctactctgaatgtacgttcgaatatacgttcttgtagttctggtataatgccaataccttcatcgctaatagcaatgtcgatagtatcttgatcttcgttttcactaatattaatatcaatgcgactaccaacatttgaaaattttagcgcattatcaagtaagtttgttaaaatacgctcaagtggcgttcgatattgataaaatgcatcaatttcgttacagaaattcacttctaatgtgcggttttcatgtttgatacgttgctcatatggttgcaatattgatacaagtaattggtctagttgtattaattctgggggatatgttttacctgtatttaaagtgataatatgagtcatatcatcaaataatgttgataatctgtttgcttgtttaattaatatgtcgtatgactctttaatctcatgatccttagtgattataccatcacgtagtccttcagaatatgaaataatgcttgctaaaggtgtttttaaatcatgggctaagttttgaatcagttctgttttttcttgttgttcggatttaatttgattcatttgttgcgtaatttcagaagccattttattaaaagattgatttaattcataaatttcttttggtgaattaaacgttttatcattgcttgcgtaatttccgttagcaaattgcttagtttttatattaaactgcttaattttttgtataagtggattaataaaaatactacatattaataaggttaaacagcttgtaattattgtcgttaaggtcaaagttagtgtcatatggccgttaaaccacattaaaatatatgcaattgctaaaatagttgaagttaatagtatactcgatacgacgccaataatgatttgacttctaattgataacaccattatcggctcctttcaaatttatatcctaatccccatacagttgtgatggtatatgttgtaaagctctctttttctaatttttctctaatacggtgtatatggacattcacggtattagcatcttcgtaatagtcatatccccaaactttttcaagtaattctgatttagaaataacttcattttctctagaagctaaataccacaataactcaaattccttaatacgcatagggacttcgtgaccatttacagtcacaactttacttaagttaataagtgttaattcatcaaacgacagttgttcaactggttgatgatggtatttcttcattcttgtaagtaaattattaatacgtaaaacgagttcccttggactaaatggttttttgacatagtcatctgcacctaaagttaaggcgtaaatggtatcatgttcttgtgttttggcagttaaatagataaaggggatatctaatttttgccttttcatttctttgacaatgtcgtaaccattaacttctggcatcatgatatcaagtaccatgatatcaatatcatttgatagtaaagaaattgcttctttaccgctagttgtcgttgttactttgtaaccttcatattcaaaataggtttgacaaatgtctacaatgtcttgttcatcatccacgatcagtaagtgggtcatctattttttcacctctgttcttacgacctctaaagtaattaatgatttctttaagtgaaatctgttttaacaatgagtgactcattagtaaaaggataaagaaagttaattgaagaggatacgtaaatatcatatctgctaagatataatttatcataacaaaggctccaaagaaactagcagcatatgcaaaaactccaaaaattaaacctaatccaattgcaatctctccgagtgggacaacaatatcaaataatgacgtcgtatgtgcaactatatttgcgaaaaaccacttataccactctggtgaatcagtattgttagcgatgactggtactaaacctttcagcgtaaatccgcccgttaatttttcgtagccttgcattaacataacaatacctgaacccacacgaatgataaatgtaacgagtagcaataatttattcatgatgttcacattctttctatttattgtgtgtaatttatataaacataagattaagcaacataatgcgatttgtagtgttatgtgaacaggaagtgtttgagctcatgggttgcttaagctaaacaaacctcaagctctaaaaaaatttacttatgtgctctgcaatcttatgggatttaatagttgtatatatattgaaaaaaggaaagtatgatttctacaagctaggggggctgtgaaatcatacgctttccattgagtaatgagtgtaatgtatattttaaaaatttgtaatgtatagtaatagtatgttgtaaataaaagtttaactcagaaattgattattttaatttagcgccgccgaagatgacgtgagcttttttacaatagattgttacttcatcatatttgcttaaatctacatttttaagatcaaatgtttgtttttctttatcgtagtcaaccattgcgatttctttaccgtttttaatgtcgccattttttgttaggtagacgtataaatctggaccttttgatgatttgtagttagtaagcattaatttaccatttttaatctcagctttaccttcaacagtttcaccgtttttagaactgaatgtacctgttaggtgttttgttttatcagttttaacattgctatcttctgactttgttttttgttcagttttgttaccttgatcttgtgaattagaattaccacaagcacctaaagctaatgttgtgataacagcaccagctgctaaaaaatattttgtattcatgctaactcctcatttcttcaatttgataagttaagtttaaaatgaaggcaaataatatgccattaactaattcttaacttcgtttaaatatcgcttaactaatattgaagaaagaataatttgaaaatgaaaataattgtctgatttaaataaataggggtcaaaataagaggagggcgtttttttaagtaaggaaatatttatctgaactagataacactataaaacacttctgatattttgaactaagaatatcagaagtgtttaatagttttggtattaaaatttataaaccttttgccacaataaaaacaacaagaaaataagatagacgattaaatacaagtaccaatatggtgttaaaaccatcataacgataaatgaaatgttaataatgataagtcctttaatcattagtttctttattttgttattattttcagcagtttcatctaagctattaaatgttgaaataaacaacataataccaccaatgatgaaaatggcaggggctaaaaatggaatagacatatatattgattgtgtacttgaaaagtcggtaacacgttgcgttaaactgacaacaatcgttaatatgatagcaataaatttttggtctgtaatgtatacaggttttaattttttatcaatgtaaaactgtagtatcgtccaaatgataaacatcgttatagtacacagagtaataaagttatatttatcaattatgaatgtatttataaaggcgtttatcgtaatagataacaacattgcacttaatgataaatgttgcatttgatgcctatataaattgaatccagttataagtacgacgatagcaatattaattaatatatatacaatcatgatggactcctgttcgttatacttcaatcaactattatatcaattaatatattgttattcattagatatgacttgcaaaaagtaaaataagttatcctttatacaccttttttattgctccaaagtaatgtatgaagttgtggtaacacataaacgtgattcatatcattactttgcataactaaatccaccaactgctcgtagcgttctaacaacttttcggtatgattatctacgctgtctgataaatatgggttaccaacttgtaaatagaagggaatatctggataacggtggtgtatcattttggcaaaatcataatctttatcgtcgaatacaactacttttaagtttaatgatgaaggtacgcattgtgtaatcacttcatctaacttttttaaatcaggtgtcatagttgaacttggtggttttggactaatcgttaaatcatcaatttgtgtcatccaaggttggaatttactgccttgtgtctccagtgcgctgaaaatacctttatcttgaaataagtcaactaactcttggatacctttaattaatgctgggttaccaccagaaattgtaacgtggttaaataaatcgccaccaattcgttttaattcatcataaatttcttcagcggtcatgagttttatatcgcctttagcactaccatcccaagtaaatgcagaatcacaccagctacagcgataatcacatccagctgttctcacaaacatcgtttttctaccgattactcgaccttcaccctgaatggttggaccgaatatttcgagtacaggaattttagccattagttacacctgttcctttggtctaaatacgacataacttgttggtgtttctcttacaaatacttgaatacattttggttggtgttcgagcgatgccaaattttctttaacaatttgataaattgtttccgctacgatttcagttgaagggattttgtttttaaaagcaggtaagttatttaacagttgatggtcaaatttaccgtgtatcatctttttcaaatggctaaagttcactaagaagccagtgtcatctagtttatcaccgacaattgttaaattaacaaagtaagtatgaccatggacattttgacaaatacctgcttcttcacatggaatgtgatgtgcagccgaaaaattaaaatctttatttaattcgaattgatatggatgcgttgtactaggatagatttgttgtaacattttaaagcgctcctttactttcaagatattgatttagtccacgttgacgtaaatgacaagctggacattcaccacagccatccccaatgataccgttatagcatgttaatgtttttgtacgaatataatctaaaacttcgagttcatcacttaatttccacgtttctgctttgtttaaccacattaaaggagtatgaatgacaaaatctttgtccatagctaggcttaatgttacgttcattgattttataaaactatcgcgacagtctgggtagcctgaaaagtctgtttcacatacgcctgtaataatatgcttagccccaatttgataagctagagcgcctgcaaacgacaagaaaagtaaatttctagctggaacaaatgtattaggtataccatcttcattattagtaatttccatatcatgttgtgttaatgcgtttggagtaagttgtgataataatgacatatctaaaacgtgatgtttcattccttgatcttgtgcaatttgttttgcgacttcaatttcagtatcatgtctttggccataattaaacgttacgagttcaacttctttgaaatgtttttttgcataaaagagacatgttgtactgtcttgaccaccactaaagacaacgatggctttttcattatttaatacactttccattttgtaattgctcctatcattaataatattaataaagaggttaatggcattgataagcccgtttttaatttataaaataaaaaaagcctatctccataaaagatagacgaaagaaatgggttgctcctataatatatattaaaggtttaccaacgaatgtttgaaatttcaatgtctagttttttatagagggtttcagctaggaacctctgatattcatttatgtacgatgaatagaatataccatatattagttaaaatcaaggtcaggataatgacaatgcttttaaagttttagctacatccaatacatattataaaaataaaacacatttagaacggagtatacaatgattctagtcatagataataatgattcatttacatataatttaatagactatattaagactcaaacgaaactaacagttcaagttgttggtattgataatctgctgatagaagacgtcattaatatgaagccaaaagcaattgttatttcgcctgggccgggtaatccggatgattatcctatcttgaatgaagtgttagaacaattttatcagcgtgtacctatactaggtgtatgtttaggatttcaatgtatcgtgtcttattttggtggaaatatcattcacggctatcatcctgtacacggacatactacacagttacgccataccaatgaaggtatttttcaaggactgcctcaaaatttcaatgtaatgcgttatcattcattaattgctgacggagcgacttttccaaattgcttaaagattacagcaaaaaacgatgaagcgattattatggcatttgagcatattagatttccggtttttggtgtgcaatatcatcctgaatctattttgagtgaatacggttatcgacaagttgaattatttttatcgaaggtaggtgattactgtgagaatagaatataattatcgctactatttaactgaaaatgaatataagcaataccatattcaattaaagggatttataaagaagtatgttgctactaagttggctgatgtgggagaagtgatacactttgcacaagcgcagcaacgacaaggtagatatgtctcgttatatttaagttacgaagcggcaaagtattttaatcatgctatgtgtacacattcattagctaaagatgatatttatgcagcagcttatagttttgaaaaagcggaaagcataaattcaacatatgaacatcaaacttcttatgtatcaaagtatcatttttcatttgttgaatcttctgaggttatgatgactaatattaaacgtgtccaacaagcaattgttgaaggcgaaacgtatcaagtgaactatacggcgcgcttaacggataacatttattatcctattagtactttatatgaacgattaactcaatttagtaatggtaattatactgcgttattacaaactgatgaaatccaagtagcgtctatctcaccagaattattttttcaaaaaggacaatttaacaatgtcgataacgttatcataagcaaaccgatgaaagggacaatgcctagaggtaaaacggaagctgaagatcaacagtattataaaacattgcaaacttcttcgaaagatcgtgcagaaaatgtcatgattgttgatttactaagaaacgatatagggagaatatcacagagtggctcaattaaggtgtataaactattttttattgaggcatataaaactgtatttcaaatgacttcgatggtaagtggaactttaaaaaataatacagacttaactcaaattttaacatcgttatttccttgtggttcgattacaggtgcaccgaaactgaatacaatgaaatatattaaacaattagaaagttcacctcgtggtatatactgcggagcaattggactattacttccaactgaagatgataaaatgatttttaatattccgattcgcactattgagtataaatatggacaagcgatttatggagtcggagcaggtattacaattgattctaagccaaaagatgaagtgaatgaattttacgcaaaaaccaagattttggagatgttataatgcaattatttgaaacaatgaaaattgataatggacatatccctagacttacttatcatactaatcgcataaaatgttcttctgagcgattaaactttaaatttgatgaacatgcatggcgaaatgaattaaacgatgtaacaacaaagtatcacagtggtcaatatagacttaaaatcgtattaaatgctgaaagcaaatttgaaacgatagtgtcacctttacctgagaaaagtagttttacagcaaaatttcaagtgttgcccaaagtagttaatccaacttttataaaaaataaaacgacagaacgaaagcatttagcacacaatcatgaaacagatttaatattgctaacttcagaggacggcaaggtccttgaatttgatattggcaacattgtcattgaagaggatggaaaatggtacacaccaagttataaagatgatttcttaaaaggatgcatgcgtgattatttaatagatagtgacaaacttgttgaaaaagactttaataaaaacgaattgatttataaatatcataacaatgagatacgtttatttttgataaatagtttacgagaggttgccgatgtccacctttgcctttaaaattagtatgataataaagtagaaaatgatgtgaaaacaaatttaaaaattaaatggggccaaatatgattattgtttatattgtgctgttgttaattcttgtatacgtaaattatcgattagtgaatcgattgctatctgaaaatagaatatatgttgttcgtttgatagcaacaattactactgttataagctttatccttgtatacgcattaattcacgaacttatgccttttgttgtgcgggcaatggatttaatgtaccaccagtaaatttagtgagtaggtaaaatgaactattcaatcgattctataattaaaaatgaaagtaaagtaaccaaatattgaagaggtgtacaaatgaaaatatatagtcaaggtgaccaagccattgtagtcgcaattgaaaaagaagtatctaaaagtttaaccgaagatttattaacacttcgctcatatttaattgaacaaaattatccatttattatagaaattgtgccatcagaatcagacatgatgattgtctatgacgcaagggatatgattaaacaccataatatacaatcaccttttttatacatgaaagcactaatagaatcgattcatttaaacataaaacatgattttaaccagcaagatttgattgaaataccaattgtgtatggttcgaaatatggtccggatttagaatcacttttaaaacattacaaaatcaagctagaaacttttattgaattacattctaaggcgcaatattttgtttcgatgatgggatattcacctgggtttccttatttaactggattaaataagaaattgtatattaatcacacgagtaaacagaaaaaattcattccagctggttctgtagtacttgaagggaaaaaatgcggtattgtaactacggatacaattaatgattggttagttattggttatacaccattatcactttttaatccgaaagaatcagatttcgcacgcttaaagttaggcgataatattaaatttagacctatcaatgaaaatgaattagaagtaggagcgtttaaagatgtcaatcataattgaaaaaagtggcttattcagtagctttcaggactttggcagaaggggatatgaacatgatggtgtaattccatgtggtgcacttgatactttagcacatgaaattgctaatcgattagttgcaaatgacaagaatgaagcaactttggaaatgactaataaaatggcaacgattcgttttacagaacctacgctgattgcattagcagggggtaatgtcaaagcttacactgagcatatgactatatctccatataaattgtatttgttagataaaggcgatgttttaaagtttagagaaacaagttatacatcgcgagtgtatttagctgtgggaggcggatttgaattagatgcatggttaggatctaactcaaccgactttaatgtaaaaattggtggttttaaaggtagaacattacaagatggcgatgaaataaagcttaagagagattatacagctcgtcatcataagttatttgaaaaccttgctcacacgaaacaaacagattggggtattgatggatacgccttgtcatttaattatatgtctgatgtatttcatgtcgttaaaaataaaggtacggaagattttaaagaagatgccattcaaagatttgtgaaacatgattataaagtaacgagcaaagcaaatcgcatggggatgatgcttgaaggtgaaaaaatcaaagctttttatgaagatatgccaccgtatcagactgtcaaaaaaggaacgatacaaattaagcgtgatggcacacctattatcctattaaatgatcattatacgctaggtagctacccgcaaatcggtacaatcgcaagttatcatttaacgaaattagcacaaaaaccgcaaggatcacgtttgaaatttcaatttatagatattttaacggctgaaaagaaccttgttaagtatagtaactggttaaaccaattattccatggaatagaatatagaatgcaattagaaatgatgaaataatatttggtacgtagctcatactcgagtccgatgcaaataatttcctcctaatgtataatgaaataatactgtgttttatctgcgaaatgtatcattttctaattcgtttcacagtaaaatgaaaagataaagtgtgtttttacttgaattttgactaaaattactctatatttattaattgagctatgcttattattacaatttgattacaaattttaaatttgttaattgaatgataatattaaataaagaaacttacacaagcaaatatgagttgtagcccaaaatacttgttaaatcaaagttgaaagctacaaataacgaaaattataaacttgaatctgaaagtaattactataattatgacaatgttaacttttaaacgcacttattaattaactacataatgttaatatctaatttattcaagtactttcgcaagatttattatctaaataacgggggaaagaatcatgagttcacaaaaaaagaaaattagtctttttgcgttcttcttattaaccgtaataacgattaccttgaagacgtatttttcttattatgttgatttttctttaggtgttaaaggtttagtacaaaacttaatattattgatgaatccttatagtttagtagcactggttttaagtgtgttcctattctttaaaggcaaaaaagcattttggttcatgttcataggcggcttcttattgacgttcctattatatgccaatgttgtgtactttagattcttctctgattttttaacgtttagtactttaaaccaagtaggtaacgtagaatctatgggtggtgcggttagtgcatcattcaaatggtatgactttgtttatttcattgatacgttagtttacttattcattttaatatttaaaacaaaatggttagacacaaaagcatttagtaagaaatttgttcctgtcgtaatggcggcttcagtagcattattcttcttaaacttagcttttgctgaaactgacagaccagaattattaacacgtacatttgaccataaatatttagtgaaatatttaggaccttataactttacagtatacgatggtgttaaaactatcgaaaataatcaacaaaaagcgctagcatctgaagatgacttaacaaaagtattaaattatacgaaacaacgtcaaacagagcctaacccagaatattatggggtggcaaagaagaaaaatattattaagattcatttagaaagtttccaaaccttcttaattaataaaaaggttaatggtaaagaagtaacaccgtttttaaacaaattatcaagtgggaaagagcaattcacatacttccctaactttttccatcaaacaggtcaaggtaaaacatctgactctgaatttacaatggataacagtttatacggtttaccgcaaggttctgccttttcattaaaaggagataatacgtatcagtcattaccagcaattttagatcaaaagcaaggctacaaatctgatgtcatgcacggtgactataaaacattctggaacagagaccaagtatataaacactttggtatcgataaattctatgatgcaacatactatgacatgtcagataaaaacgttgtaaacttaggcttgaaagacaaaattttctttaaagattctgctaattatcaagctaagatgaaatcaccattctattctcatttaattacattgactaaccactatccattcacattagatgaaaaggatgcaactattgagaaatcaaacacaggtgatgcaacagttgatggttatattcaaacagcacgttatttagacgaagcattagaagaatatattaatgacttgaagaaaaaaggattatatgacaattcagtgattatgatttatggtgaccactatggtatctctgaaaaccataacaatgccatggaaaaactattaggtgaaaaaatcacaccggctaaatttacagatttaaacagaactggtttctggattaaaatccctggtaaatctggtggtatcaataatgaatatgctggtcaagtcgatgtaatgccaacaattttacatttggctggtatagatacgaagaactatttaatgttcggtactgatttattctctaaaggtcataatcaagtagttccattcagaaatggtgactttataacaaaagattataaatatgttaatggtaagatttattctaataaaaataatgaactcataactactcaaccagctgatttcgaaaagaataaaaagcaagttgaaaaggatctcgaaatgagtgacaacgtgcttaatggtgatttgtttagattctacaaaaatccagacttcaaaaaggtaaatccttcgaagtataaatatgaaacaggacctaaagcaaactctaaaaaataatatctaaacacgaactcggattgataaaatatcaatccgggtttttattatgttcttttatattatgttttacattatatgtgttgataaaaaggtatattataaagatcattagcatagtcatcaaagccttaacaagttttatttatagttgaagcaacaatatattaaattatgacacttaacggtatcgatttcttttgatttcaaaaaggtgtataatgtatagaactgatttaagtacgtagagatttcaacagaagaaggaagatgggtatggaagcatataaaattgaacatttaaataaatcttatgccgataagactatattcgataacctagatttatcaatttcagaaggtgaaaaaataggtttagtaggcataaatggtacagggaaaagtacgttgttaaaagtaattggtggtattgatgatgattttacagccaatgttatgcatccaaatcaatatcgaattcgatattcgtctcagaaacaggaccttaatgaagatatgacagtttttgatgcagtattaagttctgatacaacaactttacgcatcatcaagcaatatgagcaggcagtacaagcttatgcggatgaccaaagtgataaattgttcaagcgaatgatggatgcgcaagatgctatggatcaacatgatgcttgggactataacgctgaaattaaaacaatcctctcaaaactaggtatacatgatactactaaatacattaaagaattatccggcggacaacaaaaacgtgttgtacttgctaaaacattaatagaacaaccagatttattgttattagatgaacctacgaaccatttagacttcgaatcaatcagctggttgatcaattatgtgaagcaatatcctcatactgttttattcgtaacccatgatcgatattttttaaatgaagtttccactagaattattgaactaaacagaggtaagttagcgtcatatcctggtaactatgaatcttatattgaaatgcgcgctgaaagagaagtaacacttcaaaagcaacaacaaaagcaacgagctttatataaggaagaacttgcttggatgagggctggagctaaggctcgtactacaaagcaacaagctagaattaatcgatttaatgacctagaaaatgaagttaaccagcaatataaagacgataaaggtgaattgaatcttgcttattcaagattaggtaagcaagtgttcgaattagaagacttatcaaaggctattaatgataaagtattaattgaacatctgacggaaattattcaaaaaggtgagcgtattggtgttgttgggccaaatggagctggtaaaacaacactcttaaatattttgagtggagaagaccaacaattcgaaggtaaattgaagactgggcagacggttaaagtagcttattttaagcaaacagatgagaccctggatagagatattcgtatgattgattatttaagagaagaaaatgagatcgcaaaagaaaaagatggaacctcggtatctattacacaacttcttgaacgatttttatttccaagtgcaactcatggtaaaaaagtttataaattatctggtggagagcaaaagcgtttgtatttattacgtctactcgtacaccagccaaatgttctgttgttagatgaaccgacaaatgatttagatactgagactttaacaatacttgaagattatattcatactttcggtggtacagtgattaccgtaagccatgatcgctacttcttaaataaagttgcacagtcatattggtttattcatgatggtcagatggaaaagattatcggaacttttgaagattatgaaagttataaaaaatcattagataaaaataaatccacattgaagcaacaatctaaatcttctacaactgtacgtaagaaaaatggtttatcatataaagaaaaattagaatatgaacaattgatgaaacgcatagaacaagcggaagtaagaatggaagaaattgatgtgctcatgattgaggcaagtgcagattatgggaaaattaaagaattaaacgaagaaaaagaacaacttgaaattcaatatgatttagacatcacaagatggagtgagttagaagaaattaaagaacaacaataaggggtcaatttatgatgcaacaaacattatcgcattactttgggtatgaaacgtttcgaccaggacaagaagaaattattagcaaagtattagaccatcgtaatgtgcttggtgtcttaccaactggtggaggtaagtctatatgctatcaagtaccaggtttattgttaggtggtacaacaattgtaataagtccactaatatcattaatgaaagatcaagtggatcaattaaaagcgatgggaattcaagctgcttttttaaatagtagtttgactcaaaaagagcaacaacgtattgaaaaagcattatcaaatggagaaattcaatttttgtatgttgcaccagaacgatttgaaaaccgatattttttaaatatgcttcagcgtataaagattcacttagtcgcgtttgatgaagcgcattgtatttctaaatggggtcatgatttcaggccgagttaccaaaatgttatttcaaaagtatttacgttacctcaagattttacaataatagcgttgacagcaactgccacggttgaagtacagcaagatattagagaaaagttaaatatcgctcaaactgatcaaattaaaacgagtactaagcgtagaaacttaatttttaaagtaaatcctacttatcaacgtcaaaaatttatattggattatattaaaacacacgatgaagatgcaggtattatttattgttctacacgtaagcaagttgaagagcttcaagaagccttagaaagtcagaaaattgaaagtgttatatatcatgcaggtttgagcaataaagaaagagaagaagcgcagaatgatttcttatttgatcgtgttaaagtagtcgttgctacaaatgcttttggtatgggtattgataaatccaatgtacgctttgttattcattataatatgcctggagatttagaatcttattatcaagaagcgggtcgtgcaggtcgtgacgggttgaaaagtgaatgtattttgttatttagcgaacgcgatatcaatttacacgagtattttataacagtctctcaagctgatgatgactataaagataaaatgggcgaaaagttaactaaaatgattcaatatacaaaaacaaaaaaatgtctagaagcaacaattgtccattattttgaaccgaatgaaaaattagaagaatgtgaacaatgtagtaattgtgttcaacaagataaatcatataatatgacacaagaagctaagatgattattagttgcatcgctcgtatgaaacaacaagagagttatagtgttatcattcaagtgttaagaggagagtcaacagattatattaagtataaaggttatgaccaaatttcaacccatggtttaatgaaaggttacacaacatcagaattaagtcacttaatagatgaattaagattcaaagggttcttaaatgaaaatgacgaaatattaatgtgtgatacttcaattaaaaaattactcagtaatgaagtagaagtattcacaacaccatttaagcaaaaagcgactgaaaaagtatttataaatacggttgaaggggttgaccgagtattattcagtcagttggtagaagttcgtaaaaagttaagtgacaaattaacgatagcacctgtaagtatattttctgattacacgttggaggaatttgctaaacgtaagcctgcttcgaaacaagatatgattaatattgatggcgtaggtagttacaaattaaaacattattgtccagcatttttagaaacgattcaaaattataaagccaaagtatagtgaagacacctagtaagcattccttgttttactgggtgtttttttgaattcaaggtaaaataacactatttcttaactggagattacctattattcattattttattaaaaaagttcaaggataaatcatttaaatttgaaaattgtaataaacgtggttaaatagggaatacatacatataatctcggttttatgctatgagaaaaaaagaggtggcaaagtgattaagtttaaaaatgtaactaagcgttatggcaaacatgttgctgtcgataacattagtttcaatattaatgagggtgaattttttgtgctaattggaccttcaggttgtggaaaaactacgacattaaaaatgattaatcgactcattcacttaagtgaaggttatatttattttaaagataaaccaataagtgattatccagtatacgaaatgcgttgggatattggatacgtattgcagcagattgcattattcccacatatgacaatcaaagaaaatattgcacaagtgccacaaatgaaaaagtggaaagaaaaagatatagataaaagagtagatgaattacttgaaatggttggattagaacctgaaaaatataaaaacagaaaacctgatgaattgtcaggggggcaacgacaacgtgtaggagttatacgtgcgttagcagctgatccaccagttattttaatggatgaaccgtttagtgcattagacccaatcagccgagaaaaacttcaagatgatttaattgaattacaaactaaaattaagaagacaatcatatttgttacacatgatattcaagaggcgatgaaacttggtgataagatttgtcttttgaatgaagggcatattgaacaaattgacacaccagaaggatttaaaaataatcctcaaagtgaatttgttaaacaatttatgggtagtcatttagaagatgatgcgccatgtgttgaagagaacgcaattatccgtgacttggatattatgaaaccaatcgatgaggttacatctatgagcgcttatccaattgtttatgacaatcaaccaattgaagtattgtatcaacttttatcagagagcgagcgtgtcattgtcatgcaagaagatagcgtaggtcaatatgttattgataggaaagatatcttcaaatatttgtcccagaaaaaggaggtagctcaacatgactaactttttcgacatattgagtgaacgtaaggggcaactcttttcgacaatgatagaacatattcaaatatcatttatcgcattattgattgcaactgctattgcggtaccattaggtattttattaacgaagactaaaacgatatctgaaatcgtaatgaatattgcggcaattcttcaaaccataccatcgttggcattattaggtttaatgattcctttatttggtatcggtcgtgtgccagcaattattgcacttgtagtgtatgcgttgttaccaattttaaggaatacgtatactggaattaaagaagttgatccatcactcattgaagcggctaaaggtataggtatgaaaccatttagacgtttaactaaagtcgaacttccgatagcaatgcctgttataatggctggtgtaagaacggctatggtattaattataggtacagcaacactagcagcattaattggtgcaggcggactaggagatttaattttattaggtatagaccgtaacaatgcatcgttgatattattaggtgcaattccagcagccttattggcaattatatttgatttaattttaagatttatggctaaattatcttataaaaagttattgatgacgttaggtgttatagtgatgattattatactggctatcgctattcctatgtttgcacaaaaaggtgataaaattacgttagctggaaagcttggctccgagccatcgattattacaaatatgtataaaattttaatagaagaagagaccaaaaatactgtagaagtgaaagatggtatgggcaaaacagcatttttatttaatgctttaaaatctgacgatatagatgggtatttagaatttactggaacagttttaggtgaattaacaaaagaaccattgaagtcaaaagaagagaaaaaagtttatgaacaagctaagcaaagtcttgaaaagaaatatcaaatgactatgttaaaaccaatgaagtataacaatacgtatgctttagctgtaaaacgtgattttgctaaacaacataatatacgtacaattggtgatttaaataaggttaaagatcaacttaaaccaggatttacattggaatttaatgatcgtccagatggttacaaagctgttcaaaaggcttataatttaaatttagataacatacgtacaatggaacctaagttgagatatcaagcgatcaataaaggtaatattaatttaatagatgcatattcaactgacgctgaattaaaacaatatgatatggttgtgttaaaagatgataagcacgtatttccaccatatcaaggagcaccattatttaaagaaagctttttaaagaaacatccagaaattaagaaaccgttaaacaaactagaaaacaaaatatctgatgaagatatgcaaatgatgaactataaagtaacagttaaaaatgaagacccatatacagttgcgaaagattatttaaaagcaaaagggttaatcaaataacgaccaacgccacataagatgcgtaacaccaaattatatcttatgtggcgttgttatatttaaatctataattatgttcaatttaaacatgcaataatgattaaaaaatatgacatgttaaacacaatgtaagctattatgatgtgaaaatagtagcattgcattttagaaacatagagcgatataatgaatataagttttttgaaatttcagttaattctaaggaggttgtttttattatgaaagaacaacttaatcaactatcagcatatcagcctggtttatctccaagggcattgaaagaaaagtatggcattgaaggagatttatataaacttgcatcaaatgaaaatttgtatggaccatcgcctaaagttaaagaagcgatatcagcacacttagatgagttatattattatcctgaaacaggatcaccgacattaaaagcggcgattagtaaacatttaaatgtagatcaatcacgcattttatttggtgcgggattagatgaagttatattaatgatttctagagctgtattaacgccaggggatactattgttacaagtgaagcgacattcggtcaatattatcacaatgcgattgttgaatcagctaatgtgatacaagtacctttaaaagatggtggcttcgatttagaaggtattttaaaagaagttaatgaagatacgtcattggtatggttatgtaatccaaataatcctacaggtacatattttaatcatgagagcttagattcgtttttatctcaagtacctccacatgtaccagtaattatagatgaagcttattttgaatttgtgacagcagaggactacccggatacacttgctttgcaacaaaaatatgacaatgctttcttattacgtacattttcaaaggcgtatggattagcgggtttacgtgtaggatatgtggtagcaagtgaacatgcgattgaaaaatggaacatcattagaccaccatttaatgtgacacgtatatctgaatacgcagcagttgcagcacttgaagatcaacaatatttaaaagaggtaacacataaaaatagtgttgaacgcgaaagattttatcaattacctcaaagtgagtatttcttgccaagtcaaacgaattttatatttgtaaaaacaaagcgggtaaatgaactttatgaagcacttttaaatgtagggtgtattacgcgaccatttccaactggtgttagaattacaattggttttaaagaacaaaatgataaaatgttagaagttttatcaaactttaaatacgaatagtaagtggggagtgggacagaaatgatactttcgcaaaatttatttcgtcgtcccaccccaacttgcattgtctgtagaaattgggaatccaatttctctttgttggggccccgccggcaaggttgactagaattgaaaaaagcttgttacaagcgcattttcgttcagtcaactactgccaatataactttgtagagcattgaacattgatttatgtctcaagctcaatgcagtgtgaatgatgaggtgagagtattcagtgtaaaaagcaacaatagatgatattgttttgtatcaattgcttttttgctatactgaatcaatactgatattttgaggagaagattaaaatgacccgtaaatcaatcgcgattgatatggatgaagtattggcagatacattaggagaaatcattgatgctgtcaattttagagcggatttaggtattaaaatggaagctttgaatggtcaaaaacttaaacatgttattcctgaacatgatggattaattacagaagtattgagagaatcaggcttcttcagacatcttaaagtgatgccgtatgcacaagaagttgtgaaaaaattaactgaacattatgatgtatatattgctacagcagcaatggatgtaccaacatcatttagtgataaatatgaatggttactagagttctttccatttttagatcctcagcattttgttttttgtggtagaaaaaacatcgttaaagctgattatttaatagatgacaatcctagacagcttgaaatttttactggtacaccgattatgtttacagcagtgcataatattaatgatgatcgatttgaacgcgtaaatagctggaaagatgtagaacagtattttttagataatattgagaaataaaatatatcacttgaaaaatttcatgtagaaaagatgatggataggctataaagtaattgtgactgagatgaacttttatgtcttagacactacaacactatattggcagtagttgactgcggggccccaacatagagaaattggaacgccaatttctacagacaatgcaagttggggtgggccccaacataaagaaatactttttctttagaaattagtatttcttatgcatgagtgtaactcatgcattcatatttttaagtacacattagctgtgactaatgataaagaatcgctacataatcaatcattagtcgttctttatcatttccgtcccgctctcaataaatgttagtttatcttattattataaatcggatgaatgtgttaatctatggcagattacacgtcatccgattttttatagaatttgaaaaagacgcataaaccactatgatttaaaatacaacatcaatcattttagtggcatgcgccaaaattatatgtctgtttttgaaacagggtaatagcttaaagctaataaaaacgaatataaggtgcgttgaatcttatgattacactccaaacctaatataatatcgggttaagatcattccggatgcttacaaatcattgacagtaagtaactgaatggcatttggtataacctcaatatcaataggtgtttctaatgaaatttcgccatcaatatcaactttcattgctggatctgttgtaagtgaaatctttttaccaggtatatgctcaataccttgagtaatttcattccaattcatgctatcacgctttttaaaaatatcatttaaaatactgaaactttgttcattaaaaatgaaagtgttcagttcaccatcttgaggagacaaatcagtcaatggtatacgactaccaccaatgaatggaccatttgctgttagtatcatggtcgtttcgccagaatatgtcttatcatctattgataattgataattaaattgtgttggatttagcagtgttttgacagttgatccaatataactcaatttaccaaatatatcttttgaaccatcttgtacgttttcagcgttttgaacaatgagacctaagccaacaaagttgagtgcatattgattatttattttaattacatcgtatgtaccaacttgtgcagaaatcatttgttcactagcttgtttatgattaggtgctatatttagcgtttttgtaaaatcattaaaagtaccgcctggtaaaatgccaatagggagttgaaggtcatgtgtcataacaccgtttataagttcgttaaccgtgccatcaccgccaagaataaataatatatctacatcttttgcatagtttttagttttgatttcttggcaatatttaataatgtcaccttcgttttcactcaattgaatagaaagatgcttacaaattgaacttaatgctgttgtaacttccccaataccttgattaatattttttaatccactgtgttcatggtaaaagaggacaccatgtgtatatttattttccatagtttagcctactttctaaaaattggttcattaaatatatatacccacttttaattgttaataccaaaaatatgtttttaaatagagaaaatggtaataaatgaaattgatttctatagagtgggacgagaaaatatagttatagctgtctataatgagcatattaagtttttatttatactgatatcttgaatttaattaatagaaacctataaaaaaacagtaagccatttaaatgacttactgttttttgaattaggccaacaatattaacgtatacctttcatcgctttgatgattaaaggtgagattgctaatacaattgttgtaacaataattgcaacaacacctaggaaaataaagtaatttgtttgacctagtggttctattaacttaactaaagtaccattgattgcttgtgcagaagcgttagttaagtaccaaatactcatcatttgggcattaaatgctttaggtgctaacttaacagcagcactattacccgttggtgataagcatagctcaccgataacacaaataatgtacgataaaataacccagttaactgaaaagtttgatgaacctgatgcataacctacaataccaattagtatgtatgacgcacctgctaagaacgtaccaattgcaaattttactggcaggctaggttgtttagttccaagcttttgccataaaagtgaaataattggagctagtaataaaataaataatgggttaattgattggaagatcgcttcaccaaagtttgttttccaaccaaataagtttaatttcatatctgaatgttcaattccatatatgtttaatacattagacccttgttcttgaatagcccagaacaccattccaagaataaataatggaataaatgctttaacacgagaacgttcagtatcagtgacatctttacttctaataattaaagtgaagtaaatgattggtaatgcaatacctaatactaaaacagtattactaactaagttaaatgataatgagttagttaatgcaccaataacgataattaatacaattgctaaaacaacacttccgataataagaccatactttttcttttcagctggtgtcaatgggttagtaggtttcataccaacgctacctaagtttttgcggttgaaaagtacataccatactaaacctaatgccataccaactgctgcaatcaagaatccgccgtggaagtttttaacattaacaaagtgttgcaaaataataggtgataataatgcacccatattaactgacatatagaaaataacaaaacctgcatccatacgtctatcattttcaggatataaacggccaacgatatttgaaatgtttggcttcattaaacctgaaccaataatgatgaagaacattgatgtgaataagccgattaatgcaaatggtaagcttaaacaaatatgtccgataataataaagactgcacctaataaagtagcgcctctagtgcctgtaattctgtcagcaatccatccgcctggtattgatgtcatatagattaatgaaccataaactgacataattgacatagctgttgttttatcaattccaaggccattatctgttacggcaaagtacatgtagaaaatgagtagggcacgcatgccataataactaaacctttcccagaactctacaaagaagagtacgcctagtcctcgaggatgcccgaaaaatcctgtttgaggtatgtcttgaatttgatttccatgggagttttgttgtgtcatgtatacatcccatcctttcttcccctaatacaatagtttaagtaaatttgattgtgccttatcaactaaatattccaacaaatcacaaaaaaataaaaatattgagaatattctgttattaagcgcgcacaattaattagagataatataaaaatatacttattgacgttaaagtgcaataggtttctataaaaatgttgtttaattcgtgtactaatattcttttggtgtactttggtataaaatgttattttaatgtaacctattatgtatgctaaatgaaaaacacaccaataagttaggaaaatcaacttattggtgtgtttattaaatgatacatttaacgattatctattttttcgggatataaatcatgattcatcaaacgatgctcagccattttttcatatttagaatttggacgtccatagtttgtataaggatcaatagaaattccaccacgtggtgtgaacttgccccagacttcaatataatgtgggtccataagctctatcaaatcattcataataatattcatacaatcttcgtgaaaatcaccgtgatttctgaaactaaataagtataatttcaaagattttgattcaaccattttaacatttggaatatatgaaatatagatagttgcaaaatctggttgcccagtaattggacataatgatgtaaattctggacagttgaattttacgaaatagtcacgaccttgatgcttattatcaaacgattctaatacatcaggacgatagtcaaaattgtaagtattgtcttgatttcctaataaagttatatcttgtaattcatcttgttgacggccatgtgccatataaagcgctcctttaaatttatttttttattattttggcgtctcggcgtgctttttcaaacatgtaataacttgcaccgataataacgacgtaacctaatgttgcatagaaatctggagattctccgaatagaataaatccaagtattgctgtgaaaattatagatgcatacgtaaaaatagaaatatcttttgctgctgcaaaactatatgctaaagtaacaccaatttgacccacagcggcagctaagccagcccctaatagataaagtatttgcatctgactcattggttcataagtatatgcagtgaaaggtattaaaacgatgacagaaaataaggagaagtaaaatactatagtatatggtgcttctcttgtactaagtgctcgaacacatgtatatgctgatgctgcaaaaatacctgagaataagccagctaatgatggaatcatagatgatgaaaattcaggtttcactattaaaagcatacctaaaatagcaattatcattgctgtaatttgatacttccttaccttttcatgtaagaaaacaatgcttaataaaatcgtccagaaaggattgagtttcattaatgaatcggcatcactaagtaccatatgatcaatggcataaatatttaacaatacaccaataagtccaagtgttgatcgtgttattaataagggttgacttgaaagtctgccaaacattggctgatggtatttatatataaaaaataatggaataaacattgctactaagtttcgtgctaatgatttttgaaaaacaggaaggtcacctgcaagtctgaaaaacactgacataaaactgaaaccaatagccgaaattaaaatggcaatgataccttttactttaggattcaattttatcgcctcttttatataaaattaacgtatttatattagcataaaacaacatgttgtgcataaatagttgaaatttactataaaaagactataatagactgtagcgaacaaacgttctgtgtttatttgtcggaataatagggcattacacttttatgaatgtttgtgttattacataaaacaaatatcaattcagtatcaagctaataagctttttcttgatttctgttgatacaattgagattgacacagatttaaaaaaatcaagtgatatctactaaaaaatttttttaaatttgttcaagtttttctaatttagtattggtgcctagttggaacgttttacgaacattcgattagaaaatggcactttaaatcatagtgtgtcttatgtataatgaaacacataatatagtgttggtgaaacgaaaaagacacaatatcttgtgttttgtatgcaaatgctttatttatgaagaaattacatttaaaagtaatttaacacagaaatttaatagttattatcaattaatagtcatatttttagaaaatgtactgagcaaatggaagatatccaatgatgtaaacactacatatagtgatttttatacattcaacccatataagctactattttctcaaatataaatctatgcaattggtttacatttgagaaaataagtagcttcattatagttaatacaatgctgagataaccatagtaaccatgttgttaaagcattttttaattggaatgactactttatttaaaagggttgaagaaagaaggtgatccaatgaaaataatatatttttcatttactggaaatgtccgtcgttttattaagagaacagaacttgaaaatacgcttgagattacagcagaaaattgtatggaaccagttcatgaaccgtttattatcgttactggcactattggatttggagaagtaccagaacccgttcaatcttttttagaagttaatcatcaatacatcagaggtgtggcagctagcggtaatcgaaattggggactaaatttcgcaaaagcgggtcgcacgatatcagaagagtataatgtccctttattaatgaagtttgagttacatggaaaaaacaaagacgttattgaatttaagaacaaggtgggtaattttaatgaaaaccatggaagagaaaaagtacaatcatattgaattaaataatgaggtcactaaacgaagagaagatggattctttagtttagaaaaagaccaagaagctttagtagcttatttagaagaagtaaaagacaaaacaatcttcttcgacactgaaatcgagcgtttacgttatttagtagacaacgatttttatttcaatgtgtttgatatttatagtgaagcggatctaattgaaatcactgattatgcaaaatcaatcccgtttaattttgcaagttatatgtcagctagtaaatttttcaaagattacgctttgaaaacaaatgataaaagtcaatacttagaagactataatcaacacgttgccattgttgctttatacctagcaaatggtaataaagcacaagctaaacaatttatttctgctatggttgaacaaagatatcaaccagcgacaccaacatttttaaacgcaggccgtgcgcgtcgtggtgagctagtgtcatgtttcttattagaagtggatgacagcttaaattcaattaactttattgattcaactgcaaaacaattaagtaaaattgggggcggcgttgcaattaacttatctaaattgcgtgcacgtggtgaagcaattaaaggaattaaaggcgtagcgaaaggcgttttacctattgctaagtcacttgaaggtggctttagctatgcagatcaacttggtcaacgccctggtgctggtgctgtgtacttaaatatcttccattatgatgtagaagaatttttagatactaaaaaagtaaatgcggatgaagatttacgtttatctacaatatcaactggtttaattgttccatctaaattcttcgatttagctaaagaaggtaaggacttttatatgtttgcacctcatacagttaaagaagaatatggtgtgacattagacgatatcgatttagaaaaatattatgatgacatggttgcaaacccaaatgttgagaaaaagaaaaagaatgcgcgtgaaatgttgaatttaattgcgcaaacacaattacaatcaggttatccatatttaatgtttaaagataatgctaacagagtgcatccgaattcaaacattggacaaattaaaatgagtaacttatgtacggaaattttccaactacaagaaacttcaattattaatgactatggtattgaagacgaaattaaacgtgatatttcttgtaacttgggctcattaaatattgttaatgtaatggaaagcggaaaattcagagattcagttcactctggtatggacgcattaactgttgtgagtgatgtagcaaatattcaaaatgcaccaggagttagaaaagctaacagtgaattacattcagttggtcttggtgtgatgaatttacacggttacctagcaaaaaataaaattggttatgagtcagaagaagcaaaagattttgcaaatatcttctttatgatgatgaatttctactcaatcgaacgttcaatggaaatcgctaaagagcgtggtatcaaatatcaagactttgaaaagtctgattatgctaatggcaaatatttcgagttctatacaactcaagaatttgaacctcaattcgaaaaagtacgtgaattattcgatggtatggctattcctacttctgaggattggaagaaactacaacaagatgttgaacaatatggtttatatcatgcatatagattagcaattgctccaacacaaagtatttcttatgttcaaaatgcaacaagttctgtaatgccaatcgttgaccaaattgaacgtcgtacttatggtaatgcggaaacattttaccctatgccattcttatcaccacaaacaatgtggtactacaaatcagcattcaatactgatcagatgaaattaatcgatttaattgcgacaattcaaacgcatattgaccaaggtatctcaacgatcctttatgttaattctgaaatttctacacgtgagttagcaagattatatgtatatgcgcactataaaggattaaaatcactttactatactagaaataaattattaagtgtagaagaatgtacaagttgttctatctaacaattaaatgttgaaaatgacaaacagctaatcatctgctctgaattagcagatgattagactgctatgtctgtatttgtcaattattgagtaacattacaggaggaaattatattcatgatagctgttaattggaacacacaagaagatatgacgaatatgttttggagacaaaatatatctcaaatgtgggttgaaacagaatttaaagtatcaaaagacattgcaagttggaagactttatctgaagctgaacaagacacatttaaaaaagcattagctggtttaacaggcttagatacacatcaagcagatgatggcatgcctttagttatgctacatacgactgacttaaggaaaaaagcagtttattcatttatggcgatgatggagcaaatacacgcgaaaagctattcacatattttcacaacactattaccatctagtgaaacaaactacctattagatgaatgggttttagaggaaccccatttaaaatataaatctgataaaattgttgctaattatcacaaactttggggtaaagaagcttcgatatacgaccaatatatggccagagttacgagtgtatttttagaaacattcttattcttctcaggtttctattatccactatatcttgctggtcaagggaaaatgacgacatcaggtgaaatcattcgtaaaattcttttagatgaatctattcatggtgtatttaccggtttagatgcacagcatttacgaaatgaactatctgaaagtgagaaacaaaaagcagatcaagaaatgtataaattgctaaatgacttgtatttaaatgaagagtcatacacaaaaatgttatacgatgatcttggaatcactgaagatgtgctaaactatgttaaatataatggaaacaaagcactttcaaacttaggctttgaaccttattttgaggaacgtgaatttaacccaatcattgagaatgccttagatacaacaactaaaaaccatgacttcttctcagtaaaaggtgatggttatgtattagcattaaacgtagaagcattacaagatgatgactttgtatttgacaacaaataacaattaaattaaaagaccttcacatgtaaagggaaatagcgattcgtttcgtcttgtctcctacatgttgaaggtctttttttatgtgtatctaactcattatgagtctgagtaagaaatcaatgctctaagatgtacaatgctatttatattggcagtagttggcggggccccaacacagaagcaggcggaaagtcagctaacaatattgtgcaagttggcggggccccaacatagaagcaggcggaaagtcagctaacaatattgtgcaagttggcggggccccaacataaaagcaggcggaaagtcagctaacaatattgtgcaagttcgggcggggccccaacataaagaaaaactttttcctttagaaattatcacttccacatgagttttactcatgtattcctatttttaagtacacattagctgaggctaatgttaagaaccactacttaatcaatcattagtagtttttatcatttccactattcccagacatcaaaatcttaagtgttctattttactttaagtaaacaaaatacacattccgaaaaattaaatttcagtttaattgcaaatatcaataaaattgacactaaattatttgaaaggctattgaaattatggtcaaaaaacgctactattaatgagaaatattatcaatgataatgattatcattaatttaaagggagaaaaatttgtaatgaagtatttattaaagggaaatattttgcttctattactaatattgttgacaattatttcgttgttcataggtgtgagtgaactatcaattaaagatttactacatttaactgagtcacagcggaatattttattctcaagccgaataccaaggacgatgagtattttaattgctggaagttcgttggctttagcaggcttgataatgcaacaaatgatgcaaaataagtttgttagtccgactacagctggaacgatggaatgggctaaactaggtattttaattgctttattgttctttccaaccggtcatattttattaaaactagtatttgctgttatttgcagtatttgcggtacgtttttatttgttaaaatcattgattttataaaagtgaaagatgtcatttttgtaccgcttttaggaattatgatgggtgggattgttgcaagtttcacaaccttcatctcattgcgcacgaatgctgttcaaagcattggtaactggcttaacgggaactttgccattatcacaagtggacgctatgaaattttatatttaagtattcctcttttagcattgacatatctttttgctaatcatttcacgattgtaggaatgggtaaagactttactaataatttaggtttgagttacgaaaaattaattaacatcgcattgtttattactgcaactattacagcattggtagtggtgactgttggaacattaccgttcttaggactagtaataccaaatattatttcaatttatcgaggtgatcatttgaaaaatgctatccctcatacgatgatgttaggtgccatctttgtattattttctgatatagttggcagaattgttgtttatccatatgaaataaatattggtttaacaataggtgtatttggaacaatcattttccttatcttgcttatgaaaggtaggaaaaattatgcgcaacaataataaaaaaataatgcttttaattgcagtaacgttattaattagtatgctgtacttatttgtaggtattgattttgaaatatttgaatatcaattttcaagtcgtttaagaaagttcatattaattattttagtaggtgctgccattgcaacttcagtggtgatttttcaagcgattacaaataaccgtctattgacaccatcaataatggggttagatgcagtttatttatttatcaaagtattgccagtctttttatttggaattcaatcggtatgggttactaatgtatatttgaactttatattaacacttataacgatggtgttattcgcactaatcctattccaaggtatctttaaaatcggacatttttcaatttattttatcttacttattggtgtccttttaggaacattttttagaagcataacaggttttattcaactgattatggatcctgagtcatttttagcaatacaaagtagtatgtttgctaattttaatgcttctaattcgaatttagttactttctcagcagtgctattagtaatcttattagtcattacaattttactattgccttatttagatgtattgcttttaggtcgtgctgaagcaattaatcttgggatatcgtatgaaaaattaacgcgaattctacttgtaatagtctcagttttagtttctgtgtcaactgcattagtaggaccaattacatttttaggtttattaactgtaaatctagcgcatgaactaatgaagacgtatgaacataagtatattttaattgcgacaatttgcttgagttggattagtttatttagtgcgcaatgggtagttgaaaatgtgtttgaagctacgacagaaatgagtatacttattgatttgattggtggaagttatttcatttatctattagttagaaggagaaatgcgcaatgattcaagttgaaaatttaactaaaactataaataatcaaatgatattggaagatattagcatagatatcgaaaaaggtaaattgacttctttaattggacctaatggtgcgggtaagagtactttactttcagcgatatgtaggttaattcgttttgagaacggtgaagtgaaaatagatggacagctcatgtctgattataaaaataatgacttgtcgaaaaaaatatctatattaaaacaaacaaaccatactgaaatgaatattacggtagagcagttggtaaactttggacgattcccttattctaaaggtcgtttgacgaaagaggatcatgatattgtcaatgatgcgctagatttgttgcaactacaagatatcagaaatcgtaatattaagtcattatctggtggacaacgtcagcgtgcatacattgcaatgacaatagcacaagatactgaatatattttgctagatgaaccattaaataatttagatatgaagcatgctgttcaaattatgcaaacgttaaaaatgttagcgcataaaatgaataaagcgattgtcattgtgttacatgatattaactttgcgtcctgttattcagatcagattgtagcattgaaaaacggacaactagttaagtcagatttgaaagataatgtcattcaaagtagtgttttaagtgatttatatgacatgaatattcaaattgaacatataagaaatcaaaggatttgtttatattttaaggattgataatttggagacactttaaaggggtgatgcgccaattaaagaagggttaaacgtaaagcatttatttatatttcacatcaagcacacagattaagccaaaagaggagaatattatattatgaagaaaacagtcttatatttagtattagcagtaatgtttttattagcggcatgcggtaacaattctgataaagaacaatcaaaatcagaaactaaaggttctaaagatacagtaaaaattgaaaataactataaaatgcgtggcgagaaaaaagatggtagtgacgctaaaaaagttaaagaaactgttgaagtaccaaaaaatcctaaaaatgcagttgtgttagactatggcgcattagatgtaatgaaagaaatgggcttatcagataaagtaaaagcattacctaaaggggaaggcggtaagtcattaccgaatttcttagaatcatttaaagatgataaatatacaaacgttggtaatttaaaagaagtgaattttgataaaattgctgcgacgaaacccgaagtaatctttatctctggacgtacagctaatcaaaagaatttagatgaattcaaaaaagctgcacctaaagcgaaaattgtttatgttggtgcagatgaaaagaacttaattggttcaatgaaacaaaacactgaaaatatcggaaaaatttacgataaagaagataaagctaaagaattaaataaagatttagataacaaaattgcttcaatgaaagataaaacgaaaaacttcaataaaactgttatgtatttactagttaacgaaggtgaattatcaacatttggacctaaaggtcgttttggtggattagtttacgatacattaggattcaatgcagttgataaaaaagtaagtaatagcaatcatggacaaaatgtttctaacgaatatgttaataaagaaaatccagatgttattttagcgatggatagaggtcaagcgataagtggtaaatcaactgcgaaacaagcattaaataatcctgtattaaaaaatgttaaagcaattaaagaagacaaagtatataatttagatcctaaattatggtactttgcagctggatcaactacaactacaattaaacaaattgaggaacttgataaagttgtaaaataattttaaaagaggggaacaatggttaaaggtcttaatcattgctcccctcttttctttaaaaaaggaaatctgggacgtcaatcaatgtcctagactctaaaatgttctgttgtcagtcgttggttgaatgaacatgtacttgtaacaagttcatttcaatactagtgggctccaaacatagagaaatttgattttcaatttctactgacaatgcaagttggcggggcccaaacatagagaatttcaaaaaggaattctacagaagtggtgctttatcatgtctgacccactccctataatgttttgactatgttgtttaaatttcaaaataaatatgatagtgatatttacagcgattgttaaaccgagattggcaatttggacaacgctctaccatcatatattcattgattgttaattcgtgtttgcatacaccgcataagattgctttttcgttaaatgaaggctcagaccaacgcttaatggcgtgcttttcaaactcattatggcacttatagcatggatagtatttattacaacatttaaatttaatagcaataatatcttcttcggtaaaataatggcgacagcgtgtttcagtatcgattaatgaaccataaactttaggcatagacaaagctccttaacttacgattcctttggatgttcaccaataatgcgaacttcacgatttaattcaatgccaaatttttctttgacggtcttttgtacataatgaataaggttttcataatctgtagcagttccattgtctacatttaccataaaaccagcgtgtttggttgaaacttcaacgccgccaatacggtgaccttgcaaattagaatcttgtatcaatttacctgcaaaatgaccaggcggtctttggaatacactaccacatgaaggatactctaaaggttgtttagattctctacgttctgttaaatcatccattttagcttgtatttcagtcattttaccaggagctaaagtaaatgcagcttctaatacaactaagtgttctttttgaataatgctattacgataatctaactctaattcttttgttgtaagtttaattaacgagccttgttcgtttacgcaaagcgcatagtctatacaatctttaacttcgccaccataagcgccagcattcatatacactgcaccaccaattgaacctggaataccacatgcaaattcaaggccagtaagtgcgtaatcacgagcaacacgtgagacatcaataattgcagcgccgctaccggctattatcgcatcatcagatacttcgatatgatctagtgataataaactaattacaataccgcgaataccaccttcacggataataatatttgagccatttcctaaatatgtaacaggaatctcattttgataggcatatttaacaactgcttgtacttcttcatttttagtaggggtaatgtaaaagtcggcattaccacctgttttagtataagtgtatcgttttaaaggttcatcaactttaattttttcatttgggataagttgttgtaaagcttgatagatgtctttatttatcacttctcagtacatcctttctcatgtctttaatatcatatagtattataccaattttaaaattcatttgcgaaaattgaaaagaaagtattagaattagtataattataaaatacggcattattgtcgttataagtattttttacatagtttttcaaagtattgttgcttttgcatctcatattgtctaattgttaagctatgttgcaatatttggtgtttttttgtattgaattgcaaagcaatatcatcattagttgataagaggtaatcaagtgcaagataagattcaaatgtttgggtattcatttgaatgatatgtagacgcacctgttgttttagttcatgaaaattgttaaacttcgccatcataactttcttagtatatttatgatgcaaacgataaaaccctacataatttaagcgtttttcatctaaggatgtaatatcatgcaaattttctacacctactaaaatatctaaaattggctctgttgaatatttaaaatgatgcgtaccgccaatatgttttgtatattttactgggctgtctaagaggttgaataataatgattcaatttcagtgtattgtgattgaaaacaattagttaaatcactattaatgaatggttgaacatttgaatacatgataaactcctttgatattgaaaattaatttaatcacgataaagtctggaatactataacataattcattttcataataaacatgtttttgtataatgaatctgttaaggagtgcaatcatgaaaaaaattgttattatcgctgttttagcgattttatttgtagtaataagtgcttgtggtaataaagaaaaagaggcacaacatcaatttactaagcaatttaaagatgttgagcaaaaacaaaaagaattacaacatgtcatggataatatacatttgaaagaaattgatcatctaagtaaaactgatacaactgataaaaatagtaaagaatttaaggcactacaagaagatgttaaaaaccatctcatacctaaatttgaagcatattataagtcagcaaaaaatttgcctgatgatacaatgaaagttaagaaattaaaaaaagaatatatgacgcttgcaaatgagaagaaggatgcgatatatcaattaaaaaaattcataggtttatgtaatcaatctatcaagtataacgaagacattttagattatacgaaacaatttgaaaaaaatagatacaaagttgaatcagaaattaaattagctgataataaaagtgaagcaactaatcttacgacaaaattagaacataataataaagcgttaagagatactgcgaagaagaacctagatgatagtaaagaaaatgaagtaaaaggcgcgattaaaaatcacattatgccaatgattgaaaagcaaattaccgatattaaccaaactaatattagtgataagcatgttaataatgcaaggaaaaacgcaatagaaatgtattacagtctgcagaactattataatacacgtattgaaacaataaaggttagtgagaagttatcaaaagtcgatgtagataagttgccgaaaaagggtatagatataactcacggcgataaagcctttgaaaaaaagcttgaaaaattagaagaaaaataactataatcatttttcaaagttaaaaattttgaatttatggttaacatgtcaacttactatgtgtataatggtaaacattgatattaactatatgtataaaaatgtcacgcagatgctatttaaatgtgataaatatttttagaggtgaatagagtggctataaagctaagttcaattgaccaatttgaacaggttattgaggaaaataaatatgtttttgtattaaaacatagtgaaacttgtccaatatcggcaaatgcgtacgatcaatttaataaatttttatatgaacgcgatatggacggttattatttgattgtccaacaagaacgcgatttgtcagattatattgctaaaaaaacgaacgttaaacatgaatcacctcaagcattttattttgtaaatggtgaaatggtttggaatcgagaccacggtgatatcaatgtgtcgtcattagcacaagcagaagaataatgaaactatagggttggaacattttgccttacactactagacgtgaatagcacaacttaaattcgtgtgaatcagagtagtttggctataatgatgttctgaccttttattttatgtcacctttagaagcagttaagttagtacttttttacaaacatatgtataatatattcgagtatttttattgaaaatattttggaaaacgacgaatccaataagaaaatttaaacatgatttgtaagttagtttaataggaaatatatgctaaaccaaaagaagcatattgttatttactggaataattaataatcatgtcatgttaaatgttcgcatataatcacgagataaaatctaaaatttaagattaatcttttatgaataaaaaacgtatcacaacaaataataaagtaaggtggtcaaggttatgaaagtattagtagccatggatgagtttcatggaattatttcaagttatcaagctaatagatatgttgaagaggcagttgcaagccaaattgaaactgcagatgtagttcaagtaccattgtttaatggaagacatgaattattagattctgtatttttatggcaatctgggcaaaagtatcgtataccagtacatgatgcagatatgaatgaagttgaaggtgtttacggacaaactgatacagggatgaccgttatcgaggggaatttatttttaaaaggtaaaaaaccaattgttgaacgaacaagttatggtttaggagaaatgattaaacatgcattagataacgacgcaaaacatgttgtaatttcactaggtgggattgatagttttgatgctggtgcaggtatgttacaagcattaggtgctcaattctatgatgacgaagggcgtgtcgtagatatgagacaaggtgctggtgtaattaaatatattcgtcgtatggatatgtcgaacttacaccctaaaatggaaacagcaagaattcaagtaatgtcggatttttcaagtcgattatatggtaagcaaagtgaaatcatgcaaacttatgatgcgtatcagttgaatcataatcaagcagcagaaatcgataatttaatttggtattttagtgagttatttaaaagtgaattgaaaattgcaattggtccagttgaacgtggtggtgctggtggtggaattgcagcagtcttgaatggactgtatcaagctgaaatattaaccagtcatgcattagtagaccaactaacacatttagaaaatttagttgaacaagcggatttaattatttttggagaaggattaaatgaaaatgatcagttgctagaaacgacaacattgcgtattgcagaactttgtcataaacatcaaaaggttgccattgcaatttgtgcaactgctgaaaagtttgatttatttgaatcacaaggggttacagcaatgtttaatacatttatcgatatgccagaaacttatactgactttaaaatggggttacaaattaggcattatacggttcagtctttaaaactgttgaaaacacattttaatgttgaggtttagtaaagaaggactaaattggtgatgctgtcatgatggttaataacatttatgatggttagcaaaacgaattagaagatcgaaagtatacgtaaaaaatatgaaaaatcacgctatcattgcactgaatgttagcgtgatttttatatattaattaagcctgagttgaactagtatataatcgttggtttttagtgattttcagcgatatcttctacaattccaatgattacttgtactgctttttccataacatcaatggatgcatattcatatgggccgtggaagttaccgcaacctgtaaagatgtttggagttggtaaccccataaatgacaattgtgaaccatctgtaccaccgcgaataggttcagtgtttgctggaatatctaatttggcaaagacacgtttaggtatatcaataatatgaggcaatggtaatattttttctgccatattgaaatattgatccgatatatcaactttaactggataattttcaaaatgggcattgatatcgtcacgtatttctaaaatacgtttcttacgcaattcgaattgttttttatcatgatcacgaataatgtattgcaaagttgctttttcaacagttccttcaaagttcattaagtgataaaagccttcgtatccttctgttcgctccggaacttcactatcaggtagcaaactatcgaattgttcacctaaacgtattgcgtttaccattgcatttttagctgaaccaggatgaacatttacaccgtggcatgtaataaccgcttcagcagcgttaaagctttcatattgtaattctccatattgactaccatccatagtataagcaaaatcagcattgaagcggtcaacatcaaatttatgtggaccacgaccgatttcttcgtctggtgtaaatccaatgcgaatggtaccatgtttaatttctggatgttcttgtaaataacaaatagcttccataatttccacaatacccgctttatcgtctgcacctagtaacgatgtaccatcagttaccattaatgtatgaccaactaaactgttaagttctggaaatactttaggatctaagacacgtttagtattgcctagtttgtatggcttaccatcatagttttcaataatttgcggtttaacatttgaagcattgaaatcaggtgatgtatcaacatgcgccaaaaatccaactgttgggacgtcgacatcgatgttactttctaatgtagcaaataagtagccattttcatctaaatcagttggcaatcctaattgttgtaattctttttctaataaatgtaacaaatcccattgcttttcagttgaaggtgttgttgtagattttggatcagattgcgtatcaattgtcgtatatcttgttaatctatctatcaattggttcttcattatattcgaccccttaaactctattattcatgttgtaagattttttatatgtcttacctttgattttaccatacagttgtttgatacgtgtgtataggtaatatagaatttcagaaactaatataccgaaagcaatcgcacctgaaatcagtgtaacttctaaaaatgtatttacagcacttgtataatcatttgatactaaaaaacgagtcgcttgataagctgcaccaccaggtactaatggtataatgcctggcactatgaatataattaccggtcgtttatatctgcgactcatagtatgactcattaagcctaaaattaagcttcccaaaaatgaagcgccaacttttccaaactctaaatctaccgttaattggtaaatcgtccatgcaatggcacccacaaatccacatgctactaagaggcgtttgggtgcattgaaaatgatagagaaaagtactgttgatataaagctgattgtaaaatgaaataaataaaatagcatgctttaacagtccttccttaaatgattaataaaacgattgcgacaccagcaccgattgcgaatgctgttaatgcagcttcaacaccgcgagacatacctgcaagtaattcacccgctaataaatctcgaatggcattggtaattaatataccagggacaagtggcatgacactggctatagtaatgatatcttgattggttgcaatgcctaatttagtaaatgtggctgcaatggatatgaccacagcggctgcaacaaactctgagaaaaatttaatttgtatatagcgttgcacaaagctgaatgttaaaaatgcggatccgccagcaatgactgcaatccaacaatctgatgcgacaccaccaaacataaataggaagaagccacatgcaatggcagctgcaaagaaattcgttaaaaaagaatattgtaatgatgcatgctgtaaatgaataaattcagatttagcttcatcaattgtgagttctttatttgatattttacgtgaaagactattcgttaaagcgattttctctaaatctgttgtacgctcttgtacacgaattaatcttgtacttgttcgatcgtttaatgaaaaaataattgcagttgaactgacaaaactatatgtattatgaagaccataactatgtgcgatacggttcattgtatcttcaactcgatatgtttcagcacctgattcaagtaaaattctacctgcaattaatacaacatcaatcactttgttttcatctataattgtgattgaatctggcatatcaattcacctccaatgatatgtgttatttatttgaacaattgaagtttacaacttgttgttacaactttcaatagtgagactttgtgttagtatgatgaacttgtatggttcaaatttaaataagaaaaactgttaatctttgctattatactatgatttaataatagcaaaggattaacagttttgtcgttgttataaattgataatagggttaaacattactttgtttcgcccttgatttttggctacatgcaccatatcgtctgcatctttaaacactttacgctgtgattttggatcgtcatctgttaaataaccaacaccgatagacactgacaatttaataacttctttgtttggtaaatggaatgatgatttttcaacacccgaacgaatattttcagctaatttaacactttgatcaagtgaataattgtgaatgacaactgagaactcttcgccaccatttctaaaaattttaaattgattcggcacatagtttttaagtaattgagacatttgttttaatacagcatcacctgatttgtgtgagtaggtatcattgacatctttaaatccatcgatatcgattaataataatgcgatactttgatgttctttttcagcttttcgtgaaatttcatttaaatgtctatcaaattcttttacattacctaagcctgttaagtaatcatatttatcttcgttttcataacgatttacgagtgagaagaaatgccaaatatcgacaaatgttatcgctgaagctaaagtgataattaatgaaattggtattaaaatgataacttccgatagtgtgtaaataggactcactaacgcgacaccaaataaaatgattattgtaacaacattaagtattaataatgatagcacatcattttgttttaaaaatggtccaatagcacttgttactgcagcaataacaatcaacgtaacaccgtacataatcgagttgttaaatactacaatttcaacaattgctacaattactgtggcagataatgtatagaccatatttgtaaatctacctaaaaacaataaaggaacgaatgttaagtgaattaaataatcttcacgataagggatagggtagacagataataataatgatacgattgtcattaaaacagtgacataagccttagaaaaaaccatacgtttgttttctgaatactgtaagcgatggaataaatagattccagcgactataacagatatattgtatataaatgcttcgaacatgtctgaatcgactcctttaattgaccactagctattgtaagtgaaaacttacaatttgtcattagtttacatataaaattaatgtatgatatagactttgatgttaaaatgttgccttaaatgatatgatgaaaaaatgaataataggcgatatataagaaatgaatcgtatagttgtaaatatgatatcattgattgaacgaattaatttataataaagctataagatatacgtagaaaatagatatatcattctataaagacaatattaaataaatataacgttaaaaacaattaatatcgatgaaggtgaataaatggttacattattactagttgcagtaacaatgattgtcagtttgacgataacaccaattgttattgcaatatcgaaaagattaaatttagttgataaaccaaattttagaaaagtacacactaaacctatttcagttatgggtggtacagtgattctcttttcatttttaataggtatttggattggtcatcctattgaaacagaaatcaaaccacttattattggtgcgattattatgtacgtacttgggcttgtagatgatatctacgatttgaaaccgtatataaaattggctggtcaaattgccgctgccttagtagttgctttttatggtgtgactattgattttatttcgttgccaatgggtacaacgattcattttggatttcttagtattccaattactgtgatttggattgttgctattacaaatgcaattaacttaattgatggactcgatggtttggcgtcgggtgtttctgcaatcggactcattacaatagggttcattgcaattttacaagctaatattttcataacgatgatttgttgtgttttattaggctctttaattgggtttttattttacaatttccatcctgccaaaatatttttaggtgatagtggggctttaatgattggatttatcatcggattcctttctttactcggattcaaaaatattacaattattgcattgttcttcccaattgttatcttagcagttccattcattgatactttgttcgcaatgattcgacgtgtgaaaaaagggcagcatataatgcaagctgataaatcgcatttgcatcataaactattagctttaggctacacacatagacaaacagtattattaatctattcaatctctattttatttagtctttcgagcattattttgtatgtatcgccaccattaggtgttgtattaatgtttgtattaatcatatttagtattgaattaattgttgaatttacaggattaatagataacaactaccgaccaatattaaatttaattagtcgtaagtcatctcataaagaggaatagggaatgaaagcatagctgtatgggataatttgtattatatggctttactctttacaatttttttgtattaaatttcaaatataaaaagcactgccataaacgtgtacttcaattgtcgtttaataatacgcaattgatatttaccgtcttatgatagtgctttttatttttattcagttggtatatcgaaaggtaactgctttggagtttcttcagtcaaatcgaaatttcctgcagtcatttgatttaaaaagttaataaacgcttcatagtcacttttaacgacatcgatatagtagcttaccttatcagtgtaagtttggtttcttaacataaaatgagttgaagctaattcatattcaaatttaccagtttgatcataattcagtgttactatacatggtactgcttctcgtagttcgacacgcccgatatcataaatgacgtctctaacagcaccgctataggcgcgaattaaaccgccaccacctaatttaataccaccaaaatatcttgttactacgacacacgcattatgaacatcgagcttttttaatatgtctaacattgggacaccggcagttcctgtcggttcaccatcatcattcgctttttgaatattcatttcaggtccaatagtatatgcagaacaattatgagtggcatctttatgttctttttttattgcagcaataaatgctttagcttcatcttcattttgaacaggtttgatatgagcaatgaatcttgatttactaatcacattttcaataatgtgttcttttttaacagtaatgatattttgtgtcataataactccttaattcataagcttaagattatttaatcttcattatacactgaaaatgacatgactataaatcgtttgattgccattttctttttaactgaaatattgtatcattgctatgagtatattttaggaggacgactatgaaaattgctgtgatgaccgattctacaagttatctgtcgcaggacttaatcgataaatataatattcaaatagcgccattaagtgtgacttttgatgatgggaagaactttacagaaagtaatgaaatagcaattgaagaattttataataaaatggcatcgtctcaaacgattccaacaacaagccaaccagcaattggcgaatggattactaaatatgaaatgttaagagatcaaggttacacagatatcattgtcatttgcttatcaagtgggattagtggaagttatcaatctagttatcaagcaggggaaatggttgaaggtgttaatgtacatgcatttgatagtaagcttgcagcaatgattgaaggatgttatgtattacgtgctattgaaatggttgaagaaggatacgagccacagcaaattattgatgatttaactaatatgcgtgaacacacaggtgcatatttaattgttgatgacttaaagaatttacaaaaaagtggtcgaattactggtgctcaagcatgggttggaacattattgaaaatgaagccagttcttaagtttgaagatggcaagattataccagaagaaaaagttcgtactaaaaagcgtgccattcaaacattagaaaagaaagtattagatattgtaaaagactttgaagaagtaactttatttgtcataaatggagatcatttcgaagatggtcaagcgttatacaaaaagttacaagatgattgtccttcagcttatcaagtagcatactctgagtttggtccagttgttgcagcacatttaggttctggtggattaggtttaggctatgttggcagaaaaataagattaacataattataaaattttaataaaagagtctatattgtaattggaaattatctctcgtatacatggctttaaatgttcatcatttgaaagccaaaatgctaaagatataagaaaatcattataatattaggctcttttttacgttgaaatgaggttttaagcattaaacattacgggaaattaattcatcctcatacttcacttactaatgaaaaaattaaaaaagaagtaacaggtgtcatcaaacaaaattcaaactattattgtgttcaatgtgaaagtacaaatccaaagcatttttatcagtatgattcctcagtacattccaagaaaattgtatattgcagaaattgtatatcactgggtcgaatggataatgtaacaagatataaaataacagagagttcgcaaagttcatcacaagcatattatcatctctcatttgaattgtcggaacagcagtcttatgcctcagaacatattgttcgagccattagaaagagacaaacgattttgttatatgccgtaacaggtgcaggtaagacagaaatgatgtttcaaggcattcaatatgcaagaatacagggagataatatagctattgtgtcaccacgtgtagatgttgttgtagaaattagtaaacgtattaaagacgcatttcttaatgaagatatagacatactacaccagcaatcaagacaacaatttgaagggcattttgttgtatgcacagtgcatcaactttaccgattcaaacagcactttgatactatttttattgatgaagtcgatgcctttcctttatcaatggataaaaatttacaacaagcattgaagtcatcttctaaagttgaacatgcaacaatttatatgacagcaacaccaccgaaacaacttctgtcagagattccccacgaaaatataattaaattgccagctcgctttcataaaaaatcacttccagttcctaaatatcgttatttcaaacttaataataagaagattcagaaaatgttataccgaattttacaagatcaaattaataatcaacgttatacactggtgttttttaacaatatagaaacaatgattaaaacattttcggtttataagcagaaaattactaaattaacatacgtccatagcgaggatgtttttcgctttgaaaaagttgaacaattaaggaatggacatttcgatgtcatttttactacgacaatattagaacgtggatttacaatggcaaatttggatgttgttgttatcgatgcacatcaatatactcaagaggctttaatacaaattgctggacgtgttggacgaaaattagaatgtcctactggaaaagtattgttttttcatgaaggggtaagtatgaatatgattcaagctaaaaaagagattcaaaggatgaacaaattagcattaaaaagaggttggattgatgaataattgtttgagttgtggtgctaagttatatgaaaatataaccatttataatttgttcaagaaacctaatagattatgtgacagatgcaaagagaattgggacaatattaaacttgatattaaagcaaggcgatgttcaaggtgcttaaaacacttaaatcaagatgaagcgtattgtttagactgcaagtttctatcggcacactttaatttaatggaacaattatattgtcaatttcaatatgacggtttaatgaaagagatgatacatcagtataaatttttgaaagactattatttatgtgaattattggcacatttgattgaaataccacaaacatcttatgactatattgtgccaattccttcttcgccggcacatgatttatctagaacatttaacccggtagaagcagtactaaaagctaaagggattcgctttgataagattttaaagatgtcaaatagaccaaaacagtctcatttaactaagaaagagcgtctggcagatgaaaatccatttattattgatacggaattagatttaaatggtaaggaaatattactcgttgacgatatttatacaactggattaacaattcatcgtgcagggtgtaaattatatgctaaaaatatcagaaaattcaaagtgtttgcgtttgcacgatagcgtaaaaatgttaaaatataataaagagttaccaataaagaggtttaaggagagattactatgattagatttgaaattcatggagataacctcactatcacagatgctattcgcaactatattgaggaaaaaattggtaagttggaacgttattttaatgacgtaccaaatgcagtggcgcatgttaaagttaaaacttattcaaattcagctactaaaattgaagtaacaattccattgaaaaatgttacgttaagagctgaagagcgaaacgatgatttatacgcaggtattgatttaattaataataaacttgaaagacaagttcgaaaatataaaacacgtattaatcgtaagagccgtgatcgaggagatcaagaagtgtttgttgccgaattacaagaaatgcaagaaacacaagttgataatgacgcttacgatgataacgagatagaaattattcgttcaaaagaattcagcttaaaaccaatggattcagaagaagcggtattacaaatgaatctattaggtcatgacttctttgtattcacagacagagaaactgatggaacaagtatcgtttaccgccgtaaagacggtaaatatggcttgattcaaactagtgaacaataaattaagtttaaagcacttgtgtttttgcacaagtgcttttttatactccaaaagcaaattatgactatttcatagttcgataatgtaatttgttgaatgaaacatagtgactatgctaatgttaatggatgtatatatttgaatgttaagttaataatagtatgtcagtctattgtatagtccgagtcgaaaatcgtaaaatatttataatataatttattaggaagtataattgcgtattgagaatatatttattagtgataaacttgttgacaacagaatgtgaatgaagtatgtcataaatatatttatattgattctacaaatgagtaaataagtataattttctaactataaatgataagatatattgttgtaggccaaacagttttttagctaaaggagcgaacgaaatgggatttttatcaaaaattcttgatggcaataataaagaaattaaacagttaggtaaacttgctgataaagtaatcgctttagaagaaaaaacggcaattttaactgatgaagaaattcgtaataaaacgaaacaattccaaacagaattagctgacattgataatgtcaaaaagcaaaatgattatttagataaaattttaccagaagcatatgcacttgttagagaaggctctaaacgtgtattcaatatgacaccatataaagttcaaattatgggtggtattgcaattcataaaggtgatatcgctgagatgagaacaggtgaaggtaaaacattaacagcgacaatgccaacatacttaaatgcattagctggtagaggtgttcacgttattacagtcaatgaatacttatcaagtgttcaaagtgaagaaatggctgagttatataacttcttaggtttgactgtcggattaaacttaaacagtaagacgacagaagaaaaacgtgaagcatacgcacaagacattacttacagtactaataatgagctaggttttgattacttacgagataacatggtgaattattctgaagatagagtaatgcgtccattacattttgcaatcattgatgaggttgactcaattttaatcgacgaggcacgtacgccattaattatttctggtgaagctgaaaagtcaacgtcactttatacacaagcaaatgtttttgcgaaaatgttaaaacaggacgaagattataaatacgatgaaaaaacgaaagctgtacatttaacagaacaaggtgcggataaagctgaacgtatgttcaaagttgaaaacttatatgatgtacaaaatgttgatgttattagtcatatcaacacagctttacgtgcgcacgttacattacaacgtgacgtagactatatggttgttgatggcgaagtattaattgtcgatcaatttacaggacgtacaatgccaggccgtcgtttctcggaaggtttacaccaagctattgaagcgaaggaaggcgttcaaattcaaaatgaatctaaaactatggcgtctattacattccaaaactatttcagaatgtacaataaacttgcgggtatgacaggtacagctaaaactgaagaagaagaatttagaaatatttataacatgacagtaactcaaattccgacaaataaacctgtgcaacgtaacgataagtctgatttaatttacattagccaaaaaggtaaatttgatgcagtagtagaagatgttgttgaaaaacacaaggcagggcaaccagtgctattaggtactgttgcagttgagacttctgaatatatttcaaatttacttaaaaaacgtggtatccgtcatgatgtgttaaatgcgaaaaatcatgaacgtgaagctgaaattgttgcaggcgctggacaaaaaggtgccgttactattgccactaacatggctggtcgtggtacagatatcaaattaggtgaaggcgtagaggaattaggcggtttagcagtaataggtacagagcgacatgaatctcgtcgtattgatgaccagttacgtggtcgttctggacgtcaaggtgataaaggggatagtcgcttctatttatcattacaagatgaattaatgattcgttttggttctgaacgtttacagaaaatgatgagccgactaggtttagatgactctacaccaattgaatcaaaaatggtatcaagagctgtagaatcagcacaaaaacgtgtagaaggtaataacttcgacgcgcgtaaacgtatcttagaatacgatgaagtattacgtaaacaacgtgaaattatctataacgaaagaaatagtattattgatgaagaagacagctctcaagttgtagatgcaatgctacgttcaacgttacaacgtagtatcaattactatattaatacagcagatgacgagcctgaatatcaaccattcatcgactacattaatgacatcttcttacaagaaggtgacattacagaggatgatatcaaaggtaaagatgctgaagatattttcgaagtcgtttgggctaagattgaagcagcatatcaaagtcaaaaagatatcttagaagaacaaatgaatgagtttgagcgtatgattttacttcgttctattgatagccattggactgatcatatcgacacaatggatcaattacgtcaaggtattcacttacgttcttatgcacaacaaaatccattacgtgactatcaaaatgaaggtcatgaattatttgatatcatgatgcaaaatattgaagaagatacttgtaaattcattttaaaatctgtagtacaagttgaagataatattgaacgtgaaaaaacaacagagtttggtgaagcgaagcacgtttcagctgaagatggtaaagaaaaagtgaaaccgaaaccaatcgttaaaggcgatcaagttggtcgtaacgatgattgtccatgtggtagtggtaaaaaattcaaaaattgccatggaaaataaatgatataaaataactccttccaattaaacacctatagtttgtgttatgggaggagtctttttattttacaagcgttaaatactttaaaaaatgtgaagaagttgttaaacgttgttatgtacttagttttaaaaaatcggtttaggcatatgtcgatgataaatgtactgatttttaacaataaatgcataaactaattgtcagtgtgcttatatttcttaacattgttatttaacaaaattatgttaaaatttagcattataaaagatgcaaatcaatgacttgaattgaaatataaataggagcgaatgctatggaattatcagaaatcaaacgaaatatagataagtataatcaagatttaacacaaattagggggtctctttgacttagagaacaaagaaactaatattcaagaatatgaagaaatgatggcagaacctaatttttgggataaccaaacgaaagcgcaagatattatagataaaaataatgcgttaaaagcaatagttaatggttataaaacactacaagcagaagtagatgacatggatgctacttgggatttattacaagaagaatttgatgaagaaatgaaagaagacttagagcaagaggtcattaattttaaggctaaagtggatgaatacgaattgcaattattattagatgggcctcacgatgccaataacgcaattctagagttacatcctggtgcaggtggcacggagtctcaagattgggctaatatgctatttagaatgtatcaacgttattgtgagaagaaaggctttaaagttgaaactgttgattatctacctggggatgaagcggggattaaaagtgtaacattgctcatcaaagggcataatgcttatggttatttaaaagctgaaaaaggtgtacaccgactagtacgaatttctccatttgattcatcaggacgtcgtcatacatcatttgcatcatgcgacgttattccagattttaataatgatgaaatagagattgaaatcaatccggatgatattacagttgatacattcagagcttctggtgcaggtggtcagcatattaacaaaactgaatcggcaatacgaattacccaccacccctcaggtatagttgttaataaccaaaatgaacgttctcaaattaaaaaccgtgaagcagctatgaaaatgttaaagtctaaattatatcaattaaaattggaagagcaggcacgtgaaatggctgaaattcgtggcgaacaaaaagaaatcggctggggaagccaaattagatcatatgttttccatccatactcaatggtgaaagatcatcgtacgaacgaagaaacaggtaaggttgatgcagtgatggatggagacattggaccatttatcgaatcatatttaagacagacaatgtcgcacgattaatatatattttaaaaccgaggctctaaaagggcgtcggtttttggtttttttaaaggtagctaaataaattgtaaattagattttggaatatgatttgtttatgaatatttaagtacaattcggtagatagagttagaatatattttttaaaagttgtgtttgttaaaacaacatatgcagtgtgcatttagtaatattacctatggcgattttcaaggtattgaattaattattgaaaacgttctcaattacatggtatgaatacattttacactatgataaaaggttgtattctttttatattgttaaccatttgattacatcgttataacaatagcttttgacaaaatgtattgtgctatagtatttgcatacttaaaatactaacagcaaaggaatgacagcaagatgaaaaaatctcttacagtgacggtttcgtcagtgttagcttttttagctttaaataatgcagcacatgcacaacaacatggcacacaagtaaaaacacctgttcaacataattatgtatcaaatgttcaagcacaaacgcaatcaccgacaacttatacagtagttgctggcgattcattatataagattgctttagagcatcacttaacgttgaatcaattatattcatacaatcctggtgtaacacctttaatttttcctggtgacgtgatttcacttgtgcctcaaaataaagtgaaacaaactaaagcggttaaatcaccagtaagaaaagcaagccaagctaaaaaggtagtaaaacaacctgtacaacaagcatctaaaaaagtagtagttaagcaagcacctaagcaagcagtaactaagacagttaatgtagcatacaaacctgctcaagtacaaaaatcagtaccaactgtacctgttgcacataactacaataaatcagttgctaacagaggaaacttatatgcttatggaaactgcacatattatgctttcgatcgtcgtgcacaattaggtagaagtataggaagtttatggggcaatgcaaataactggaattacgcagcaaaagttgcaggatttaaagtagataaaacaccagaagttggcgctattttccaaacagctgctggtccatatggacatgttggtgttgttgaatctgtaaaccctaatggaacaattactgtttctgaaatgaactatgctggatttaatgttaaatcttcaagaacaattttaaatccaggaaaatataattacatccactaagtaatatatcaagacaagactatcctcttagcctgtttaagtaacaggttgagaggattttttggtatcatttaatcagagttatataaagaagatatttaaatgatatttaattgattgatatgtaaaaagaaagtataatttatgattaattaatggaggaggtaattgaaatgggtgtacatcaatattttaaaagattatcagatatggaaagacttataagattacctggaaaatttaaatattttgaacacaatgttgcagcacactcctttaaagtaactaaaattgcacaatatctagcaacagttgaagaatatcatggacgaaagattaattggaaaagcttatatgaaaaagcattaaatcatgatttcgccgaagtgtttactggtgatataaaaacacctgttaaatatgcgagtagtgaattaaaaaaattattttcgcaagttgaagaagaaatggtagagacctttattgaagaagaaattccattacaatatagagatgtttataagcaacgactgcaagaaggtaaagatgattcattagaaggccaaatactttcagttgctgataaaattgatttgctttatgaaacatttggagaaatacaaaaacgtaatcccgaagaattatttttcgaaatttatgaaatgagtctagaaacaattattcaatttgaccatttagcatctgtacaagattttattaataatatcattccagaaatgttgactgaaaactttatacctagaacagaattaagagaaacaaccatgaacattttaaataaaagaaaagaggaaaatgaatgatatggtattttagcgcagcattctttccatgtgtcttggtagtattatttagtgtaataacaagaagtaaatgggtcggtactattctgacattaattttaattggtgcctcaatctataaagagtatttccataacgagtggattatttttattgatgtagtgtcattattagctggttatttaattatagatcaactcgaatttcataaacatcaagatgaagatcgctaagattaactttaaaataatgtttcaaacaaatttgttgaaacaaaatgatgattaatataatgtgtatttacatactaaaaataacaagataaacgatttgatttaaggcaagcatagttagcacaactatgtttgtttttctttgttcgacatttttacgaacaaacgtttgctttttgtgtgactactttgctaaaatatgtaatgagaaagcaaagagttgagcggaaatataaataatacgttgaaagaggaggcatatgtgacaatggttgaacattatccttttaaaatacattctgattttgagcctcaaggtgaccaaccgcaagcaattaaagaaatcgtggaaggtattaaagcggggaaaagacatcaaactttattaggtgctactggcacagggaaaacatttacgatgagtaatgttattaaagaagttgggaaaccaacgttaattatcgcgcataacaaaacattagcaggacaattatatagtgagtttaaagaattttttcctgaaaacagggtggaatactttgtaagttactatgattattatcaaccagaggcatacgtaccgtctactgacacttttattgaaaaagatgcctcaatcaatgatgaaattgatcaactacgacattctgctacaagtgcattatttgaacgcgatgatgtaattattattgctagtgtaagttgtatatatggtttaggtaatcctgaagaatataaagatttagtagtaagtgttcgagttggtatggaaatggatagaagtgaattacttagaaaacttgtagatgtgcaatatacacgaaatgacatcgatttccaacgaggaacgtttcgagtgcgtggtgatgtagtggaaatattcccagcctctaaagaagaactttgtataagggttgagtttttcggcgatgagattgaccgtatccgagaagttaactacctaacaggtgaagtgttgaaagaaagagaacattttgcgatattcccagcttctcacttcgtaacacgtgaagaaaagttgaaagttgcgattgaacgtattgaaaaagaattggaagaacgattgaaagaattacgagatgagaataaattactagaagcgcaaaggttagaacagcgtaccaactatgatttagaaatgatgcgagagatgggattctgttcaggaattgaaaactattccgtacatttaactttgcgaccactgggttcgacaccatatactttattggattactttggcgatgattggttagtaatgattgatgaatcacatgtgacattaccgcaagttcgaggcatgtataacggagacagagcgcgtaaacaagttttggtggatcatgggtttagattaccgagtgcattagataaccgtccacttaaatttgaagaatttgaagaaaagacaaaacaacttgtgtatgtatctgcaacgcctggaccatacgaaattgaacatacggataagatggttgaacaaattattcgtcctactggtttactggatcctaagattgaggttagacctactgaaaatcaaattgacgatttattaagtgaaattcaaacaagagttgagcgtaatgaacgcgtacttgttacaacgctcactaaaaagatgagtgaagatttaaccacatacatgaaagaagcgggtattaaagttaattatctgcattcagaaatcaagacattagaacgaattgaaataattagagacttacgaatgggtacatatgatgttatcgtaggtattaatttattaagagagggtattgatataccagaagtttctctagttgtcatattagatgcagataaagaagggtttttacgttctaaccgctcattaattcaaacaataggtagagctgcgcgtaacgataaaggtgaagtcattatgtatgccgataaaatgactgattcgatgaagtatgcaattgatgagacacaacgtcgtcgagaaatacagatgaaacataatgaaaaacatggtattacacctaaaacaattaataaaaaaatacatgatttaattagtgctactgttgaaaatgacgaaaataatgacaaagcacaaactgtgatacctaagaagatgacgaaaaaagaacgtcaaaagacaatcgacaatatagaaaaagaaatgaaacaagcagcgaaagatttagatttcgagaaagctacagaattaagagatatgttatttgaattaaaagcagaagggtgacaagtaaatgaaagaaccatccatagtagtaaaaggtgctcgtgcgcataacttgaaagatattgatatcgaactacctaaaaataaattaattgttatgacaggtttatctgggtcaggtaaatcgtcattagcattcgatactatatatgctgaaggacaacgacgttatgttgaatcattaagtgcctatgcgcgtcaatttttaggccaaatggacaaaccagatgttgatacaattgaaggattatcgccagcaatttcaatagatcaaaaaacaacaagtaaaaatccaagatcaactgtagcaacagtaacagaaatatatgattatatacgtttgttatatgcacgtgttggtaaaccttactgtccaaatcacaatatagaaattgaatcgcaaacagtacaacaaatggttgaccgcattatggaattagaggcacgtacaaagattcaattattagcacctgtcatcgctcatcgtaaaggtagtcatgaaaagctaatcgaagatattggtaaaaaaggttatgtacgtttaagaatcgatggcgaaattgttgatgtaaatgatgtacctactttagataagaacaagaatcatacaatagaagttgttgtagaccgattagttgttaaagatggaattgaaacacgactagctgactctatagaaactgccttagagctttcagaaggacaattaacagtcgatgtcattgacggggaagaccttaagttttcagaaagccatgcttgtcctatatgtggattttcaatcggagagttagaaccaagaatgtttagctttaacagtccttttggtgcttgtccgacatgtgatggcttaggccaaaagttaacagtcgatgtagacttggttgttcccgacaaagataagacgctaaacgaaggtgcaatagaaccttggataccgacgagttctgatttttatccaacattgttaaaacgtgtttgtgaagtttataaaatcaatatggataaaccttttaaaaagttaacagaacgtcaacgtgatattttattgtatggttctggtgacaaagaaattgaatttacatttacacaacgtcaaggtggtactagaaaacgaacaatggttttcgagggtgtagttcctaatataagtagacgattccatgaatctccttcagaatatacacgtgaaatgatgagtaaatatatgactgaactaccttgcgaaacttgtcatggaaagcgattgagtcgtgaagcgttatctgtttatgtaggtggtttaaatattggtgaagtagtcgaatattcaatcagtcaagcgctgaactattataaaaacattgatttgtcagaacatgatcaagcgattgcaaatcaaatattgaaagaaattatttcccgactcacttttttaaataatgtgggacttgaatatttaacgttaaacagagcttcaggtacactttcaggtggtgaagcacaacgtattcgattagcaacgcaaattgggtcgcgtttgactggtgtcttatatgtattagatgagccatcaattggactgcatcaaagagataatgatcgattaattaatacacttaaagaaatgagagatttaggaaatactttaattgtagttgaacacgatgatgatacaatgcgtgcggctgattacttagtggatataggtcctggtgctggtgaacatggagggcagattgtgtctagtggtactcctcaaaaggtaatgaaagataaaaaatcattaacaggacaatacttgagtggtaagaaacgtattgaagtacctgaatatcgcagaccggcttcagatcgtaaaatttctatacgtggagctagaagcaacaatcttaaaggggttgatgtggacataccactatcaatcatgacggttgttacaggtgtatcaggttctggtaaaagctcattagtaaatgaagtattatacaaatcattagctcaaaaaattaataaatctaaagtaaagccaggattgtacgataagattgaaggtattgatcaacttgataaaattattgatattgatcaatcaccaataggtagaacgccacgctctaatccagcaacatatactggtgtgtttgatgatatacgtgatgtgtttgcgcaaacaaatgaagctaaaattcgaggatatcaaaaagggcgttttagttttaatgtaaaaggtggacgctgtgaagcttgtaaaggtgacggtattattaaaattgaaatgcattttttacctgatgtttatgttccttgtgaagtgtgtgatggtaaacgatataatcgtgagacactagaggttacttacaaaggtaaaaatattgctgacattttagaaatgactgttgaagaagcaacacaattttttgaaaatattcctaagattaagcgcaagttacaaacactagttgatgttggtcttggatacgtcacattaggtcaacaagctacaacgttatcaggtggtgaggctcaacgtgtgaaacttgcatctgaacttcataaacgttcaactggtaaatctatttatatcctagatgaaccgacaacagggttacatgttgacgatattagtagattattaaaagtattaaaccgattagttgaaaatggtgatactgttgtaattattgaacataacctagatgttatcaaaacagcagactatattatagacttaggtcctgaaggtggtagtggcggtggtactattgttgcgactggcacacccgaagatattgctcagacaaagtcatcatatacaggaaagtatttaaaagaagtacttgaacgagataaacaaaatactgaagataaataagattaaaagaagtgaaggatgttataaatttatccttcgcttctttttattaatttagtaatgaatagtagaaagaaaagatgcgtaaaaagaattatgttaagatagggtcaatctagagtagttaaacataaatcgaactgggagtgggacagaaatgataaagaatcactaatgatttattatgtagtggttctttgtcattagccacagctattgtgtacttaaaaataggaatgcatgagtgcaactcatgcataagaaatactaatttctaaagaaaaagtatttctttatgttggggccccgccaacttgcattgtttgtagaatttcttttcgaaattctttatgttggggccccgccaacttgcattgtttgtagaatttcttttcgaaattctttatgttggggccccgccaactaattccaatatatcattgtagagcttaggtcattgatttttggctcggacttttatggcgatatgaaccatgtaaattaagcaagcaataaattaatgattgatattgacttgtaaaataataacaataatgaacaattaatatttattttagcttttcaatgtagattggtgttatatttttgatatgataagaagagatgtaagagtagggataaatacaattgaggtgaacccatgttaacgacagaaaaactagttgaaacattaaagttagatttaatcgctggtgaagaaggactatcgaagccaattaaaaatgctgatatatcaagaccgggcttagagatggcaggttatttttcacattatgcgtcagatagaatacaactattaggaacaacggaactatcgttttacaatttattaccagataaggatcgcgcaggtcgtatgcgtaaactatgcagaccagaaacgcctgcaattattgtgacacgtggattgcagccaccagaagaattagttgaagctgcaaaagaattaaataccccacttatagttgctaaagatgcgactacaagtttaatgagtcgcttaacaacgtttttagagcatgcacttgcaaagacgacatctttacatggtgttttagtagatgtttacggtgttggtgtactaattaccggtgattcaggaataggtaaaagtgagactgcgttggaattagttaaacgtgggcatagattagtagcagatgataatgtagaaatacgtcaaattaataaagatgaactaatagggaaaccaccaaagttaatagaacatctattagaaatacgtggactaggtattatcaatgttatgactttatttggcgcgggttcaatattaactgaaaaacgaattagattaaatattaatttggaaaactggaacaagcaaaagttatatgaccgcgtaggtcttaatgaagagacgctaagtattttagatactgaaatcactaaaaaaacaatacctgtaagacctggtagaaatgttgcggtaattattgaggtcgctgcaatgaactatcgattaaatatcatgggcattaacacggccgaagaatttagtgaaagattaaatgaagaaattatcaagaacagtcataagagtgaggagtaggttgaatgggtattgtatttaactatatagatcctgtggcatttaacttaggaccactgagtgtacgatggtatggaattatcattgctgtcggaatattacttggttactttgttgcacaacgtgcactagttaaagcaggattacataaagatactttagtagatattattttttatagtgcactatttggatttatcgcggcacgaatctattttgtgattttccaatggccatattacgcggaaaatccaagtgaaattattaaaatatggcatggtggaatagcaatacatggtggtttaataggtggctttattgctggtgttattgtatgtaaagtgaaaaatttaaacccatttcaaattggtgatatcgttgcgccaagtataattttagcgcaaggaattggacgctggggtaactttatgaatcacgaggcacatggtggatcggtgtcacgcgcttttttagaacaattacatttgcctaattttataatagaaaatatgtatattaacggccaatattatcatccaacattcttatatgaatccatttgggatgtcgctggatttattatcttagttaatattcgtaaacatttaaaattaggagaaacattctttttatatttaacttggtattcaattggtcgattctttatagaaggattacgtacagatagcttaatgctcacaagtaatattagagttgcacaattagtatcaattcttttaattttaataagtataagtttaattgtatatagaaggattaagtataatccaccgttgtatagcaaagttggggcgcttccatggccaacaaaaaaagtgaagtagtgatagtttgaggaaatttttatcaaaaacacatcatcatacaaaccctttatggcgtgtataccgtcttgttaaattttcgaaagtttttaagaatgtaattatcattgaattttcgaaatttattccaagtatggtactgaaaagacatatatataaacaacttttaaatattaatatcggtaatcaatcgtcgatagcttataaagtaatgttagatattttttacccagaactgattacgattggtagtaacagtgttattggttacaatgtaacaattttgacgcatgaagcattagttgatgaatttcgttatggaccagtgacgataggatctaacactttgattggtgcaaatgctaccattttacccggtataacgattggtgacaatgtaaaagttgcagctggtacggttgtttcaaaagatataccggataatggatttgcatatggcaaccctatgtatataaaaatgattaggaggtgacaattttatggcgcaaaagaataataatgtaattccaatgacttttgatgatgcattttatcgtaaaatggctaaacagaagtttaaacaaagagaatataaacgagctgctgaatactttgaaaaagtgttagaattgtcacctgatgatatggaaattcaaattgattatgcacaatgtctagtgcaacttggtattgctaaaaaagcagaacatttattttatgacaatattatttataataggcatctagaagatagcttttatgaattgagtcagctcaacattgaagttaacgaaccaaacaaggcattcttgtttggtattaattatgttattgttagcgacgaccaagattatagagatgaattagatcaaatgtttgatgtgaaatatcaaagtgaagaacaaattgaacttgaagctcaattgtttgtagttcaaatactattccaatatcttttttctcaaggtcgattaaaagatgcaaagaattatgtcttacatcaaccacaagaagttcaagatcatcgtgtagtacgtaatttattggcaatgtgttatttatatctcggtgaatatgatacggctaaagcattgtacgaagcactattacaagaggatagtacagatatatatgcattatgccattatactttgctactttataacactaaggaaaatgaacaatatcaaaaatatttaaaaatattaaacaaagttgtacctatgaatgacgatgaaagttttaaattaggtattgtattaagttatttaaagcagtatcgtgcatcacaacaattgttgtaccctttatataaaaaagggaaatttttatcaattcaaatgtacaatgctttagcatataattattattatttaggtgaagaagacgaaagtcattactactgggataaattgaagcaaatttctaaagtggaaattggacatgcgccttgggtaattgaaaatagcaaagaagtttttgaccaacatattttgccattacttcaaagtgatgacagtcattatcgtttatatggtatttttttattggatcaattaaatggtaaagaaattgtgatgacggaaagtatttggcaggttttggaaaatctaaataattatgagaaattgtatttaacgtatttagttcaaggtttaacgctcaataaattagacttcattcatcgcggcttattaacgctttaccataatgaattatttgtaagtgaaaatgatgtaatggttgcatggattaatcaaggtgaactcataattgctgaaaaagtagatttaactgatgttgagccatatatcggtgcgtttatttatttgtattttaaaaatcaacctcgaaacgttacaaagaagcaaattacaacatggttaggcataacacaatataaactgaacaaaatgattgaatttctcttgagcatatagatttatgaaaagttagatttattatataatgcgcataatgattaataatgaggaggcgttaataaaatgactgaaatagattttgatatagcaattatcggtgcaggtccagctggtatgactgctgcagtatacgcatcacgtgctaatttaaaaacagttatgattgaaagaggtattccaggcggtcaaatggctaatacagaagaagtagagaacttccctggtttcgaaatgattacaggtccagatttatctacaaaaatgtttgaacacgctaaaaagtttggtgcagtttatcaatatggagatattaaatctgtagaagataaaggcgaatataaagtgattaactttggtaataaagaattaacagcgaaagcggttattattgctacaggtgcagaatacaagaaaattggtgttccgggtgaacaagaacttggtggacgcggtgtaagttattgtgcagtatgtgatggtgcattctttaaaaataaacgcctattcgttatcggtggtggtgattcagcagtagaagagggaacattcttaactaaatttgctgacaaagtaacaatcgttcaccgtcgtgatgagttacgtgcacagcgtattttacaagatagagcattcaaaaatgataaaatcgactttatttggagtcatactttgaaatcaattaatgaaaaagacggcaaagtgggttctgtgacattaacgtctacaaaagatggttcagaagaaacacacgaggctgatggtgtattcatctatattggtatgaaaccattaacagcgccatttaaagacttaggtattacaaatgatgttggttatattgtaacaaaagatgatatgacaacatcagtaccaggtatttttgcagcaggagatgttcgcgacaaaggtttacgccaaattgtcactgctactggcgatggtagtattgcagcgcaaagtgcagcggaatatattgaacatttaaacgatcaagcttaattcgaagtcgaattaagatgttgagctgtaaattatttggatatttattttaatagtgtcatcacagcgttaaaataatgtcttacttttaaattaaagcaaattatatagaaaactagaacttagtacgtatcatttgtgcgtttcaatgagttctagtttttttatatgttatattaaacttataactttatgggagtgggacagaaatgataaagagccactaatgatttattatgtagtggttcttaaacattagccacagctaatgtgtacttaaaaataggaatacatgagtaaaactcatgcataagaaatactaatttctatagaaaaagtattactttatcgttgtcccaccccaacttgcacattattgtaagctgactttccgccagcttctgtgttggggccccgccaacttgcacattattgtaagctgacttttcgtcagcttctgtgttggggccccgccaacttgcattgtctgtagaaattgggaatccaatttctctatgttggggcccacaccccaactcgcattgcctgtagaatttcttttcgaaattctctgtgttggggcccacaccccaactcgcattgcctgtagaatttcttttcgaaattctctgtgttggggcccctgactagagttgaaaaaagcttgttgcaagcgcattttcattcagtcaactactagcaatataatattatagaccctaggacattgatttatgtcccaagctccttttaaatgatgtatatttttagaaatttaatctagacatagttggaaataaatataaaacatcgttgcttaattttgtcatagaacatttaaattaacatcatgaaattcgttttggcggtgaaaaaataatggataataatgaaaaagaaaaaagtaaaagtgaactattagttgtaacaggtttatctggcgcaggtaaatctttggttattcaatgtttagaagacatgggatatttttgtgtagataatctaccaccagtgttattgcctaaatttgtagagttgatggaacaaggaaatccatccttaagaaaagtggcaattgcaattgatttaagaggtaaggaactatttaattcattagttgcagtagtggataaagtcaaaagtgaaagtgacgtcatcattgatgttatgtttttagaagcaagtactgaaaaattaatttcaagatataaggaaacgcgtcgtgcacatcctttgatggaacaaggtaaaagatcgttaatcaatgcaattaatgatgagcgagagcatttgtctcaaattagaagtatagctaattttgttatagatactacaaagttatcacctaaagaattaaaagaacgcattcgtcgatactatgaagatgaagagtttgaaacttttacaattaatgtcacaagtttcggttttaaacatgggattcagatggatgcagatttagtatttgatgtacgatttttaccaaatccatattatgtagtagatttaagacctttaacaggattagataaagacgtttataattatgttatgaaatggaaagagacggagattttctttgaaaaattaactgatttgttagattttatgatacccgggtataaaaaagaagggaaatctcaattagtaattgccatcggttgtacgggtggacaacatcgatctgtagcattagcagaacgactaggtaattatctaaatgaagtatttgaatataatgtttatgtgcatcatagggacgcacatattgaaagtggcgagaaaaaatgagacaaataaaagttgtacttatcggtggtggcactggcttatcagttatggctaggggattaagagaattcccaattgatattacggcgattgtaacagttgctgataatggtgggagtacagggaaaatcagagatgaaatggatataccagcaccaggagacatcagaaatgtgattgcagctttaagtgattctgagtcagttttaagccaactttttcagtatcgctttgaagaaaatcaaattagcggtcactcattaggtaatttattaatcgcaggtatgactaatattacgaatgatttcggacatgccattaaagcattaagtaaaattttaaatattaaaggtagagtcattccatctacaaatacaagtgtgcaattaaatgctgttatggaagatggagaaattgtttttggagaaacaaatattcctaaaaaacataaaaaaattgatcgtgtgtttttagaacctaacgatgtgcaaccaatggaagaagcaatcgatgctttaagggaagcagatttaatcgttcttggaccagggtcattatatacgagcgttatttctaacttatgtgtgaatggtatttcagatgcgttaattcattctgatgcgcctaagctatatgtttctaatgtgatgacgcaacctggggaaacagatggttatagcgtgaaagatcatatcgatgcgattcatagacaagctggacaaccgtttattgattatgtcatttgtagtacacaaactttcaatgctcaagttttgaaaaaatatgaagaaaaacattctaaaccagttgaagttaataaggctgaacttgaaaaagaaagcataaatgtaaaaacatcttcaaatttagttgaaatttctgaaaatcatttagtaagacataatactaaagtgttatcgacaatgatttatgacatagctttagaattaattagtactattcctttcgtaccaagtgataaacgtaaataatatagaacgtaatcatattatgatatgataatagagctgtgaaaaaaatgaaaatagacagtggttctaaggtgaatcatgttttaaataagaaaggaatgactgtacgatgagctttgcatcagaaatgaaaaatgaattaactagaatagacgtcgatgaaatgaatgcaaaagcagagctcagtgcactgattcgaatgaatggtgcacttagtctttcaaatcaacaatttgttataaatgttcaaacggaaaatgcaacaacggcaagacgtatttattcgttgattaaacgtgtctttaatgtggaagttgaaatattagtccgtaaaaaaatgaaacttaaaaaaaataatatttatatttgtcgtacaaagatgaaagcgaaagaaattcttgatgaattaggaattttaaaagacggcatttttacgcatgaaattgatcattcaatgattcaagatgacgaaatgagacgcagttacttgagaggagcttttctggcaggtggctcagtgaataaccctgaaacatcttcgtaccatttggaaattttttctcaaaatgagagtcatgcagaaggcttaacgaaactaatgaatagttatgagttgaatgccaaacatttagagcgaaaaaaaggaagtattacgtatttaaaagaagcggaaaagatttcggattttcttagtttgataggtggctatcaagcgttattaaaatttgaagacgtacgtattgtaagagatatgcgtaattctgttaaccgactcgttaattgtgaaacggccaatctaaataaaacagttagtgctgcgatgaaacaagttgagagcattaaattgattgataaagaaattggtattgaaaatttaccagacaggttgagagagattgctagaattcgagtagaacatcaagaaatttcgttgaaagagcttggagaaatggtatcaactggtccaatttcaaaatcaggtgtaaatcaccgattaagaaaactgaatgatttagccgataagattagaaatggtgaacaaatagaattataagtaagaaggtgtttttggtagtgaattatcaaaaacactttttttatgattaaaaagtgtttaatgaataatagtcgactaactattaaattgagctggaaagtttaatgaaggaaattcaataaccaagtgatgcctaattttctcattaaatagcatcatatgtatcaatttggtcataagaaaatatgaatgtgataattaattgagtccctgaaagtccctgatcatagacaaaaacaaaatcagcataaataagaatcccgacattgcgggattctctgtattgaaaagtattgtattttattaaaacagcctccttgaagggaattgaacccctatcttaagaaccggaatcttacgtgttatccattacaccacaaggagcaaatatgtaatcatatctctgtactatgagaagtaaaataagtacaatctaaaatagatattatcagtttacaaaggaaagagaaaagcgtcaaacaatgtaactatttaaagtcaaagtgtttgaccaaatttgacttaatatgtaaaataatgagtaacagttattacaaggaggaaatatagatgaatttaattcctacagttattgaaacaacaaaccgcggtgaacgtgcatatgatatatactcacgtttattaaaagaccgtattattatgttaggttcacaaattgatgacaacgtagcaaattcaatcgtatcacagttattattcttacaagcgcaagactcagagaaagatatttatttatacattaattcaccaggtggaagtgtaacagctggttttgcgatttatgatacaattcaacacattaaacctgatgttcaaacaatttgtatcggtatggctgcatcaatgggatcattcttattagcagctggtgcaaaaggtaaacgtttcgcgttaccaaatgcagaagtaatgattcaccaaccattaggtggtgctcaaggacaagcaactgaaatcgaaattgctgcaaatcacattttaaaaacacgtgaaaaattaaaccgcattttatcagagcgtactggtcaaagtattgaaaaaatacaaaaagacacagatcgtgataacttcttaactgcagaagaagctaaagaatatggcttaattgatgaagtgatggtacctgaaacaaaataattcaaagtaaagagtagactaagctgtctgctctttttgtatgagtaaaccaaggtgtcaataatttgtttactatactttgagcggaaatatgattgaatgaagctagttgaaccgtaactatatgaaatgttcccttcaaagtagacattgaaaggaacatttcaatcctttgtttgtaagtcgctctagacattacatttagtacatatgttgtttctaatgctcattaatggtattgattattctttaattaaatcttcaagtgccatttttaaattactatatttaaattggaatcccaatgcttgaattttattaggtaatactttttgagtatccaatactactgttgacatttgaccaagtatgagacgcattgcaagacttggtgcccaagtttcatgaggcttatgcatagctcttgctaaagtgtagccaaataaattttgacgttcaggtataggtgcagttaaattaaacggaccactagctgactcgttatttattaaaaataaaatagcttgaattaaatcattgatatgaatccatgaataccattgttgaccagaacctaatttaccaccaatgtaatattcgtatggtagtttcattgtttgtaacgcaccgccttcattcgataaaattataccgaaacgaccgatgacaactcgtgtacctaattgttcaaattgttgtgcgaaacgttcccattgatacacaatatctgataagaaatcaaaaggtaaagttttataaacttctgtgtaactcataaataaatcaggaggatagtaaccagtggcactagcattaaataaagctttaggtgctttattacgtgatttaaacaattcatataaagcttgcgtagattgaattctacttagcattagcgtttgtttatattccggtgtccatcgtttattcaatgtagcacctgctaagttgatgaccacatcgatattttgaggaactttgtgttcccacccagatttagcccagttgacatatgaaattttcttatcatttgaaatttggtcgtgtcgcgttaatatcgtgatatgtgaatctgattttttaatttcattaactaattgagatccaaccataccagtcccaccagtaattaagtattgtttcattatcattcaccccatgtaattttgtatttagttactatttaataatcattattgttgttcaaaggttatacattatttagacaataatatgtcaataactttttttgaattgtattttaataaaaatgatataagttataataaaggtgtaccttcgataacgaataaacatctcttaaaagtatgtgtaaaacgctgcatgatacaaacgaaggtaaaaatttgactccctttagtagtggacccgtacgttaatcgtgcgggtcgtttttatttatttcttattcccattatacatcaatttaaagcattaattttttaaacaaatttaagaatacatagtaatataacaatctaaacataaaaacttttaacacaacacttaaaccaatgctttaattttcaatacgtagctataatttgttgtaaaatcaaaaaggttaaaatgttaattttcaaaaaaggctcaaaatatgtttgatttagttattaaatgttaagatatataagactactatttctttgtaaaaatgaatccgatttacgagtgagtaatagtgaaggcagttttaagttgaagaaggcaaaaagagtaaatgtttattaatatttgtagaaactaggtaagcaaattagttgtgaaaatgttaatggttgcgtgataatttctatatttaaattagtttgaagtgagggagagtatgtcgaatcaaaattacgactacaataaaaatgaagatggaagtaagaagaaaatgagtacaacagcgaaagtagttagcattgcgacggtattgctattactcggaggattagtatttgcaatttttgcatatgtagatcattcgaataaagctaaagaacgtatgttgaacgaacaaaagcaggaacaaaaagaaaagcgtcaaaaagaaaatgcagaaaaagagagaaagaaaaagcaacaagaggaaaaagagcagaatgagctagattcacaagcaaaccaatatcagcaattgccacagcagaatcaatatcaatatgtgccacctcagcaacaagcacctacaaagcaacgtcctgctaaagaagagaatgatgataaagcatcaaaggatgagtcgaaagataaggatgacaaagcatctcaagataaatcagatgataatcagaagaaaactgatgataataaacaaccagctcagcctaaaccacagccgcaacaaccaacaccaaagccaaataataatcaacaaaacaatcaatcaaatcagcaagcaaaaccacaagcaccacaacaaaatagccaatcaacaacaaataaacaaaataatgctaatgataagtagtatttagtcaaacaaaaatgaaccagtatgacagacaacacaattaattaggttgtctcgaatattggttcttatttttataattgttaattaggggagagatgatacttaaatagttagttatttattttacggatagtgaaatttattttgagtgaggtgggacagaaatgatattttcgcaaaatttatttcgtcgtcccaccccaacttccattgcctgtagaaattggaaatccaatttctctatgttggggccccaccccaacttgcattgcctgtagaaattgggaggagccaatttcactatgttggggccccaccccaactcgcattgcctgtagaatttcatttcgaaattctctatgttggggcccctgactttaattgaaaaaagcttgttacaagtgcattttcgttcggttaactactactaatgtgactttttggattctagagcattgatttatgtcctagtctcaaataataagcaaatgattatcgagtcagtataagggtatacatttgactacagcgaataaaataaaacgttttgttgaataacaaatcgaaaatatattgcaagcgctttatcaaattatttagaaaatttaagttttatgcttgcaatttttgaaatagaatagtactattgcaagtgtaaagaggttaatttttgtcccacgcgggacttaaaaaggcaaccactggttgtgacatatccttatttacatttataaatataaggaggaggtagtagtgaaagacttattgcaagcacagcaaaagcttataccggatctcatagataaaatgtataaacgtttttctattcttactactatctcaaaaaatcagcctgtcggacgtcgaagtttaagcgaacatatggatatgactgaacgtgtactgcgttctgaaacagatatgcttaagaaacaagatttgataaaagttaagcctaccggaatggaaattacagctgaaggtgagcaactgatttcgcaattgaaaggttactttgatatctatgcagatgataatcgtctgtcagaaggtattaagaataaatttcaaattaaggaagttcatgttgttcctggtgatgctgataatagtcaatctgttaaaacagaattaggtagacaagcaggtcaattacttgaaggcatattacaagaagacgcgatagttgctgtaactggcggatccacgatggcatgtgttagtgaagcaattcatttattaccatataatgtattcttcgtaccagccagaggtggactaggcgaaaatgttgtctttcaggcaaacacaattgcagccagtatggcacaacaagctggcggttattatacgacgatgtatgtacctgataatgtcagtgaaacaacatataatacattgttgttagagccatcagtcataaacactttagacaaaattaaacaagcaaacgttatattacacggcattggtgatgcgctgaagatggcgcatcgacgtcaatcacctgaaaaggtcattgaacaacttcaacatcatcaagctgtcggagaggcatttggttattattttgatacacaaggtcaaattgtccataaggttaaaacaattggacttcaattagaagaccttgaatcaaaagactttatttttgcagttgcaggaggcaaatcgaaaggtgaagcaattaaagcatacttgacgattgcacccaagaatacagtgttaatcactgatgaagccgcagcaaagataatacttgaataagagataaaaagtttaatactttttaaatatcattttaaaggaggccattataatggcagtaaaagtagcaattaatggttttggtagaattggtcgtttagcattcagaagaattcaagaagtagaaggtcttgaagttgtagcagtaaacgacttaacagatgacgacatgttagcgcatttattaaaatatgacactatgcaaggtcgtttcacaggtgaagtagaggtagttgatggtggtttccgcgtaaatggtaaagaagttaaatcattcagtgaaccagatgcaagcaaattaccttggaaagacttaaatatcgatgtagtattagaatgtactggtttctacactgataaagataaagcacaagctcatattgaagcaggcgctaaaaaagtattaatctcagcaccagctactggtgacttaaaaacaatcgtattcaacactaaccaccaagagttagacggttctgaaacagttgtttcaggtgcttcatgtactacaaactcattagcaccagttgctaaagttttaaacgatgactttggtttagttgaaggtttaatgactacaattcacgcttacacaggtgatcaaaatacacaagacgcacctcacagaaaaggtgacaaacgtcgtgctcgtgcagcggcagaaaacatcatccctaactcaacaggtgctgctaaagctatcggtaaagttattcctgaaatcgatggtaaattagatggtggtgcacaacgtgttcctgtagctacaggttcattaactgaattaacagtagtattagaaaaacaagacgtaacagttgaacaagttaacgaagctatgaaaaatgcttcaaacgaatcattcggttacactgaagacgaaatcgtttcttcagacgttgtaggtatgacttacggttcattattcgacgctacacaaactcgtgtaatgtcagttggcgaccgtcaattagttaaagttgcagcttggtatgataacgaaatgtcatatactgcacaattagttcgtacattagcatacttagctgaactttctaaataattttagtatagtttttattcaaatacgctagtgctcagaactatttagcattaattaaagcttatgagtaagcggggagcacaaacgcttctccgcttatttttatataaaatttcctaattacaaggaggaaacaccatggctaaaaaaattgtttctgatttagatcttaaaggtaaaacagtcctagtacgtgctgattttaacgtacctttaaaagacggtgaaattactaatgacaaccgtatcgttcaagctttacctacaattcaatacatcatcgaacaaggtggtaaaatcgtactattttcacatttaggtaaagtgaaagaagaaagtgataaagcaaaattaactttacgtccagttgctgaagacttatctaagaaattagataaagaagttgttttcgtaccagaaacacgcggcgaaaaacttgaagctgctattaaagaccttaaagaaggcgacgtattattagttgaaaatacacgttatgaagatttagacggtaaaaaagaatctaaaaatgatccagaattaggtaaatactgggcatctttaggtgatgtgtttgtaaatgatgcttttggtactgcgcatcgtgagcatgcatctaatgttggtatttctacacatttagaaactgcagctggattcttaatggataaagaaattaagtttattggcggcgtagttaacgatccacataaaccagttgttgctattttaggtggagcaaaagtatctgacaaaattaatgtcatcaaaaacttagttaacatagctgataaaattatcatcggcggaggtatggcttatactttcttaaaagcgcaaggtaaagaaattggtatttcattattagaagaagataaaatcgacttcgcaaaagatttattagaaaaacatggtgataaaattgtattaccagtagacactaaagttgctaaagaattttctaatgatgccaaaatcactgtagtaccatctgattcaattccagcagaccaagaaggtatggatattggaccaaacactgtaaaattatttgcagatgaattagaaggtgcgcacactgttgtatggaatggacctatgggtgtattcgagttcagtaactttgcacaaggtacaattggtgtatgtaaagcaattgcaaaccttaaagatgcaattacgattatcggtggcggtgattcagctgcagcagcaatctctttaggttttgaaaatgacttcactcatatttcaactggtggcggcgcgtcattagagtacctagaaggtaaagaattgcctggtatcaaagcaatcaataataaataataaagtgatagtttaaagtgatgtggcatgtttgtttaacattgttacgggaaaacagtcacaagatgacatcgtgtttcatcacttttcaaaaatatttacaaaacaaggagtgtctttaatgagaacaccaattatagctggtaactggaaaatgaacaaaacagtacaagaagcaaaagacttcgtcaatgcattaccaacattaccagattcaaaagaagtagaatcagtaatttgtgcaccagcaattcaattagatgcattaactactgcagttaaagaaggaaaagcacaaggtttagaaatcggtgctcaaaatacgtatttcgaagataatggtgcgttcacaggtgaaacgtctccagttgcattagcagatttaggcgttaaatacgttgttatcggtcattctgaacgtcgtgaattattccacgaaacagatgaagaaattaacaaaaaagcgcacgctattttcaaacatggaatgactccaattatatgtgttggtgaaacagacgaagagcgtgaaagtggtaaagctaacgatgttgtaggtgagcaagttaagaaagctgttgcaggtttatctgaagatcaacttaaatcagttgtaattgcttatgaaccaatctgggcaatcggaactggtaaatcatcaacatctgaagatgcaaatgaaatgtgtgcatttgtacgtcaaactattgctgacttatcaagcaaagaagtatcagaagcaactcgtattcaatatggtggtagtgttaaacctaacaacattaaagaatacatggcacaaactgatattgatggggcattagtaggtggcgcatcacttaaagttgaagatttcgtacaattgttagaaggtgcaaaataatcatggctaagaaaccaactgcgttaattattttagatggttttgcgaaccgcgaaagcgaacatggtaatgcggtaaaattagcaaacaagcctaattttgatcgttattacaacaaatatccaacgactcaaatcgaagcgagtggcttagatgttggactacctgaaggacaaatgggtaactcagaagttggtcatatgaatatcggtgcaggacgtatcgtttatcaaagtttaactcgaatcaataaatcaattgaagacggtgatttctttgaaaatgatgttttaaataatgcaattgcacacgtgaattcacatgattcagcgttacacatctttggtttattgtctgacggtggtgtacacagtcattacaaacatttatttgctttgttagaacttgctaaaaaacaaggtgttgaaaaagtttacgtacacgcatttttagatggccgtgacgtagatcaaaaatccgctttgaaatacatcgaagagactgaagctaaattcaatgaattaggcattggtcaatttgcatctgtgtctggtcgttattatgcaatggatcgtgacaaacgttgggaacgtgaagaaaaagcttacaatgctattcgtaattttgatgccccaacttatgcaactgccaaagaaggtgtagaagcaagctataatgagggcttaactgacgaattcgtagtaccattcatcgttgagaatcaaaatgacggtgttaatgatggagatgcagtgatcttctataatttccgacctgatagagcagcgcaattatcggaaatttttgcgaacagagcattcgaaggctttaaagttgaacaagttaaagacttattctatgcaacattcactaagtataatgacaatatcgatgcggctatcgtcttcgaaaaagttgatttaaataatacaattggtgaaattgcacaaaataacaatttaactcaattacgtattgcagaaactgaaaaataccctcacgttacttactttatgagtggtggacgtaacgaggaatttaaaggtgaacgccgtcgtttaattgattcacctaaagttgcaacgtatgacttgaaaccagaaatgagtgcttatgaagttaaagatgcattattagaagagttaaataaaggtgacttggacttaattattttaaactttgctaaccctgatatggttggacatagtggtatgcttgagccgacaatcaaagcaatcgaagcggttgatgaatgtttaggagaagtggttgataagattttagacatggacggttatgcaattattactgctgaccatggtaactctgatcaagtattgacggatgatgatcaaccaatgactacgcatacaacgaacccagtaccagtgattgtaacaaaagaaggcgttacacttagagaaactggtcgcttaggtgacttagcacctacattattagatttattaaatgtagaacaacctgaagatatgacaggtgaatctttaattaaacactaatattgtaaaagatgttaagtaaacgcttaatgacacttattttttgaaaataatagtaatatcattttgttaaatgaaagaataaagctataataattatagaataactatttaaaggagattataaacatgccaattattacagatgtttacgctcgcgaagtcttagactctcgtggtaacccaactgttgaagtagaagtattaactgaaagtggcgcatttggtcgtgcattagtaccatcaggtgcttcaactggtgaacacgaagctgttgaattacgtgatggagacaaatcacgttatttaggtaaaggtgttactaaagcagttgaaaacgttaatgaaatcatcgcaccagaaattattgaaggtgaattttcagtattagatcaagtatctattgataaaatgatgatcgcattagacggtactccaaacaaaggtaaattaggtgcaaatgctattttaggtgtatctatcgcagtagcacgtgcagcagctgacttattaggtcaaccactttacaaatatttaggtggatttaatggtaagcagttaccagtaccaatgatgaacatcgttaatggtggttctcactcagatgctccaattgcattccaagaattcatgattttacctgtaggtgctacaacgttcaaagaatcattacgttggggtactgaaattttccacaacttaaaatcaattttaagcaaacgtggtttagaaactgcagtaggtgacgaaggtggtttcgctcctaaatttgaaggtactgaagatgctgttgaaacaattatccaagcaatcgaagcagctggttacaaaccaggtgaagaagtattcttaggatttgactgtgcatcatcagaattctatgaaaatggtgtatatgactacagtaagttcgaaggcgaacacggtgcaaaacgtacagctgcagaacaagttgactacttagaacaattagtagacaaatatcctatcattacaattgaagacggtatggacgaaaacgactgggatggttggaaacaacttacagaacgtatcggtgaccgtgtacaattagtaggtgacgatttattcgtaacaaacactgaaattttagcaaaaggtattgaaaacggaattggtaactcaatcttaattaaagttaaccaaatcggtacattaactgaaacatttgatgcaatcgaaatggctcaaaaagctggttacacagcagtagtttctcaccgttcaggtgaaacagaagatacaacaattgctgatattgctgttgctacaaacgctggtcaaattaaaactggttcattatcacgtactgaccgtattgctaaatacaatcaattattacgtatcgaagatgaattatttgaaactgctaaatatgacggtatcaaatcattctataacttagataaataattttctttataatcaaatgctgacataattttagttgaggattattatgacggtataaattaaataaagattttgagttcacgcttaaataagttcacgcttaaatttatagcctgccacagagttgagactgtggtaggttttttattttgaagtattaatcataacagactaataatcatgaggtaactaataacacatatttaacttgtattcttaaactggtataataaatttatgttgaaatgaatattgtatgacagggtattcacttttattaaaaggtaaaattaaataaaggttttatagaacgtatttaaatatatgaggagtaaacaaatggctgatagaacgaataaagaaattaaaacaggacgctttattgcaactgcatcaatcgtattctcaatattattgattattcattactttgtttcgttggataatgcgactgccaaagcattacttaatttaacgaatcaaaacacttcagataaagcgattgattacattttaaacagctttagattcactggtattatgtatattttggcttatctagcaggcttcatcactttttggaatcgacatacttatgtgtggtggtttatgtttgcagtttatgtatcaaatagtttgtttacgttgattaatttatcaatcacaattcaagcaataaaagctgcacacggtgcgtacttaacattgccaattttaattgttattataggttcggttgcattagcgatttatatgcttgttgtttctatcaaacgtaaaagtacatttaatcgctagaaaattgattttaacaataaaaatatgatatactacttgtcgtatataaggaacggaggacaatttatgcatacatttttaatcgtattattaatcattgattgtattgcattaataactgttgtactactccaagaaggtaaaagcagtggactttcaggtgccatcagtggtggtgctgagcagttattcggtaaacaaaaacaacgtggcgtcgatttattcttaaatagattaacaattattttatcaatattattttttgtacttatgatttgcataagttatcttggtatgtaaggtccggcgatgtaaatgtcgggcttttttatttataattaagaatgtaatagtttaacaataagctatgtaaaatatatagcctagttaagtatgcaaagggagcgttagatttatgcagataaaattaccaaaacctttcttttttgaggaaggtaaacgtgccgtgttattactacatggttttacaggcaattcgtctgatgttcgtcaattaggtcgatttttacaaaagaaaggttatacatcatatgcaccgcaatatgaaggccacgcggcaccaccagatgaaatactgaaatctagtcctttcgtttggtttaaagatgcgttagatggttatgattatcttgttgaacaaggttatgatgaaattgttgttgctggtctatcattaggtggggattttgctttaaaattaagcttaaatagagatgtaaagggtattgtaacgatgtgtgctcctatgggtggcaaaactgaaggtgccatttatgaaggctttttagaatatgcacgcaattttaaaaagtatgaaggtaaagatcaagagactattgataatgaaatggatcattttaaaccaactgaaactttaaaagaactaagtgaagcattagatacgattaaagagcaagttgatgaagtgttggatcctattttagtgattcaagcagaaaacgacaatatgattgatccacaatccgcaaattatatatatgaccatgtagattctgatgacaaaaatatcaagtggtacagtgaatctggacatgttattacgattgataaagagaaagaacaagtatttgaagatatttatcaatttttagagtcattagactggtcagaataaaaagagattttaacattagaaaggaggggcataatgaatttaaagcaatctatagaagagattattaatcaacctgaatatgaacctatgtcagtgtcagattttcaagatgcattaggtttaagcagtgccgactcgtttagagatttaattaaggtgcttgtggagttagaacaatcaggattaatcgaacgtacaaaaacagacagataccaaaaaaagcatagttatagaggtcaatcaaaattgataaaaggaacgttaagtcaaaataaaaaaggctttgcattcttaagacctgaagatgaggatatggaagatatatttattcccccgacgaaaattaatcgtgccttggatggagatactgttattgtagaaatccatcaatcaaaaggtgaacataaaggtaaaatcgaaggggaagttaagtcgattgagaagcattctgtaactcaagttgttggtacgtatagtgaagctagacattttggctttgttattccggatgataaacgtattatgcaagatattttcattcctaaaggtcaaagtttaggcgcagtcgatggtcataaggtacttgtacaaattactaagtatgctgatggttcagataatccagaaggacatatttctgctattttaggacataaaaatgatcctggcgtagatattttatctattatctatcaacatggcatagaaattgaatttcctgatgaagtgttacaagaagctgaagcagtacctgatcatattgaaaatactgaaattaaaggccgtcatgatttacgtgatgaattgacaatcacaattgatggtgctgatgctaaagacttagatgacgcaattagtgttaaaaagttagcgaacggtaatacgcaattaactgtaagtattgctgatgtcagctattatgtaacagaaggttctgcattggataaagaggcatatgatagagcgacaagtgtatatcttgttgaccgtgtaattccaatgattccacatcgattaagtaatggtatttgttcattgaatcctaatgttgatcgtttaactctaagctgtcgcatggaaatcgatgctagtggtcgcgttgttaaacatgaaatttttgatagtgttatacattctgattatcgaatgacgtatgatgcggtaaatcagattattactgaaaaggatcctaacattcgcgaacaatataatgaaattacgcctatgctagatttagcacaagatttatctaatcgtttgattcaaatgagaaaacgacgtggtgaaatcgattttgatattagtgaagcaaaagtattagttaacgaagacggtataccaacagatgttcaattaagacaacgtggcgagggtgaacgtctaattgaatcatttatgttaattgcaaatgaaacagttgctgaacattttagtaagttagatgtaccttttatttaccgagtgcatgagcaacctaaatcagatcgcttaagacaattctttgattttattacaaactttggcatcatgattaagggtactggcgaagatattcatccaacaacacttcaaaaggttcaagaagaagtagaaggtcgacctgaacaaatggtcatttcaacaatgatgttgcgttcaatgcaacaagcgcattatgatgatgtgaacttgggacattttggcttatcagctgaatattatacgcattttacatcaccaattagacgttatcctgatttaacagttcatcgtttaatccgtaagtatttaattgagaaatcaatggataacaaagaagtgaagcgttgggaagacaaattgcctgagttagctgaacatacttctaaacgtgaacgtcgtgctattgaggcagaacgtgatactgatgaattgaaaaaagcagaatatatgattcaacatattggtgatgaatttgaaggtattgtcagctcagtagctaacttcggtatgttcattgaattgccaaatacgatagaaggtatggttcatattgcgaatatgactgatgattattaccgttttgaagagcgtcaaatggcattaattggtgagcgtcaagctaaagtatttagaattggtgacacagttaaggttaaagtgacgcatgttgatgtagatgaacgattaattgattttcaaattgtaggtatgcctttaccgaaaaatgatcgatcacagcgcccagcgcgaggtaagacaattcaagccaaaacgcgtggtaaatcattagataaatcaaaatctgatgataagggtcgtaagaaaaaaggtaagcaacgtaaaggtaaaaaccaacgtaataatgataaatcaggtaatagtaagcataagccattttataaagataaaagtgtgaaaaagaaagcacgtcgtaagaaaaaataagcagcaatgaggtgagtatgaatggctaagaagaaatcaccaggtacattagcggaaaatcgtaaggcaagacatgattataatattgaagatacgattgaagcgggaattgtattgcaaggcacagaaataaaatcaattcgccgaggtagtgctaaccttaaagatagttatgcgcaagttaaaaacggtgaaatgtatttgaataatatgcatatagcaccatacgaagaagggaatcgttttaatcacgatcctcttcgttctcgaaaattattattgcacaagcgtgaaatcattaaattgggtgatcaaacacgtgagattggttattcgattgtgccgttaaagctttatttgaagcatggacattgtaaagtattacttggtgttgcacgaggtaagaaaaaatatgataaacgtcaagctttgaaagaaaaagcagtcaaacgagatgttgcgcgcgatatgaaagcccgttattaagcgatttagttgcttaatcgggctatatttgatatagttatatgtgcttttgtaaattacaaaagtatgatttgtttgatttattatttcggggacgttcatggattcgacaggggtcccccgagctcattaagcgtgtcggagggttgtcttcgtcatcaacacacacagtttataataactggcaaatcaaacaataatttcgcagtagctgcctaatcgcactctgcatcgcctaacagcatttcctatgtgctgttaacgcgattcaaccttaataggatatgctaaacactgccgtttgaagtctgtttagaagaaacttaatcaaactagcatcatgttggttgtttatcacttttcatgatgcgaaacctatcgataaactacacacgtagaaagatgtgtatcaggacctttggacgcgggttcaaatcccgccgtctccatatttgtagcctacagcctttgtggttgtgggcttttttattttgtgtttttcaggggataatgcattgcagaatttgttgtgagtattgatatagcagtgtttgtataggtgtttatttgatggaggaaagagtaataagtgattatgaattagtttttgagatataaggggacagtgatgtgtgtcaaataagtgtcaaaaaagttggattctgagttttacattcaacattgttcatgaagaaacttctttatacgcaaaaaattctccatgttatatatgtcaatataaaaatgtgaatcgtctacacttaattggataaatggctactgaaaaagaacttttcatttttgttacgtcactaagtgggtgtagttataaagagatgagccgagttttgatattttcattagaatcaatatgcctattaacacaatcagcaatagttgacgagacggaaataaaagaagtcgtagttaagaaatgcatttcacaacataccattgtagccatttttattgttttggatgataaactctttttggaatttttagtttttataatttgcaactacactacttcttttactaatattaatgtctaagtaatcgataaaaaattttccattgaataaatgagaagttaaaaactttacttaacctttctcattgcattttcctattcacgattttaagaacccaacatactacaaacgaattttaaaaggcgagagtaaagcttacttgtttattatacatatttaaaatccaagagtcagaacagactactcctctttataactataaaaaatagctatgaaaaaatctatcgtcatagattccttcatagctaatcttagtatgtttatttttattttaggatgctatttatcaactcaacatataactcactatttttataaccttctaatatatcattaacttgtctaataggtatttctggtacttctctaatgttttccaattttgttttaaattgtttttttgttatttgctctttatttgtagccaattggaacaagtaagaatctagcatattaatttctttatatgaatacatatatcttaataacactaaatctctagtttttaagttaggcgctagttcttcttgtaattgttctattgattgtttcattaataacaatctcatttctaattcttcattattcattttatcacactctttttatattaatgcttgaccaacttgggaaacccaaaaccctatgcttcttgcagtagaatctttaataccagttcccatcaatgcttgtgaaacttgaccttgtacatttccccatgtagcctcttcttgttttaatgcattattcaatgcgggatttacaaatttatcccatcttttttttatgattttccggcacggggactgatttctttaacaccattaaacacagattttttatttttaatcatagctttatagtatcatgttggctaagctataaataagtcagtttctctaaaaattaaataactgaatgtaagacaatcaacaaaccaaatttatacttcatctaaaccactgtggtcgtcatctttttgcttttctttttctttctctcgttcttgttcttttttgtactcttcttcaaattctttttctttcttttctacttcttctcttgtttccgctctatgagaaaaatcttcggttttaagtttactaaatttgaatgatttagaatcaactgttttatcttctgagtatttatggacatttaaattaatatttccatcacctcttaactcatagataaacatggcttgtgcagttttgccttttttaatttgatcttggttatgttctgtccaatctttatattttttatcacttaaaagataaccatctcttaatttatttactgtatttttatcatcttgagtgatattaatatagtcatgagaaatagaagatggatttaaatctttatcgtcttttttagcagtaatttccattttaaaagcgatatatttctttttctcatctttttcattgatgataaacggttcttttattttagcttcaaatttgtcactaacaatagtatcgcctttaatttttatatccatattttttttgcttttaaattctttaagttcttcatttaattcttcattgtcattttctttctttttgtgactagtgctctctttttttgcactatcttgatgatgtccacaagcacctaagataagtgtacttgctaataatatccccattacttttttcatttaacatgtctcctttatttcgcaaaaatttattttaaaaactctaaatgacttatcattttgagtaattaaacaaagttgatattttgtgagattctaagatgatattaaataattcttgtaataatgatcctatgtattgttgcaataaattaatgaaactataattactaatattatattacttttattgatagaaatatattacttttttaaaaaaacttgtaatatatcgaaagatttaaatgtaaaattttgatttgttaagaaattacgtttgtaaaaataaaaaaatcaacttatttgtatgagataaatatgtattgaagaagacgtgttattaatttggaaaatactggtcaaagatgggagctcttaaaagcgttattgtattttttagtcaatacaaatagattgccgtaataataatcgtacttgatggttaaaaaattacttaaggctataaagcaaaactttttatatgagcagtcgaatataacgtttaaaatgattgtttttggatataaacgattaagtaaaatgctttttcagtttgaaattaatcatataaatttcttatgggagggttgatatcttaatgattaacattatttcagctataggatctattggaacatttattatggctttattttattttgtatcagtttcagttcaactttatcaaatgaaaattagctttctgccagctttaggttttaaccaaattttattagaaagggaggaggatcaacttaatataatgaattcggcaacagaagagcatcatcataaagattatattaaactatataatttaggtggcggtgctgctaaaaaaattgcaatagaggttttattggggaaggataaagtcattcagaaaaaatacgtgcatattttacctagtaaagaagggtacatgttaccaattaataaaaatgtgtacgaagaattagaaagaacgattgagaacaatggtcatgaagctgatttgaatgtacgtatgacttattatcataatgtaagtcgcaaacaataggaagttatattaaaaggtcaaatcgaccgttttaatacttataataataaagaaatttatgatttgcagtttatctaaaaattgatttaagagggtagttgtttattgcgaaaaatatcattcaattttaatgaaataatggcgtcattactataaaatattactttatgttgtaatgcatttttctataagatagaactaaaaggaggggcaaagatgcaaattagacaaatacatcaacatgactttgctcaagtggaccagttaattagaacggcatttgaaaatagtgaacatggttatggtaatgaatcagagctagtagaccaaattcgtctaagtgatacgtatgacaataccttagaattagtagctgttcttcaaaatgaagttgtagggcacggtttactaagtgaagtttatcttgataacgaggcacaacgggaaattggattagtgttagcacctgtatctgttgatattcatcatcaaaataaaggtattgggaagcgattgattcaagcattagaacgagaagcaatattaaaaggatataattttatcagtgtattaggatggccgacgtattatgccaatctaggatatcaacgcgcaagtatgtacgacatttatccaccatatgatggtataccagacgaagcgtttttaattaaagaattaaaagtgaacagtttagcgggaaaaacaggtaccataaattacacatctgcttttgaaaaaatatgatttcaagctaggattacattaggtagagttcatattaataataaaaaatgtttgcaatcaaatcgtacgttgtcgtttgtaattcttaaaatagcaataaataaaatgtttgttagtaaagtattattgtggataataaaatatcgatacaaattaattgctataatgcaattttagtgtataattccattaacagagattaaatatatctttaaagggtatatagttaatataaaatgactttttaaaaagagggaataaaatgaatatgaagaaaaaagaaaaacacgcaattcggaaaaaatcgattggcgtggcttcagtgcttgtaggtacgttaatcggttttggactactcagcagtaaagaagcagatgcaagtgaaaatagtgttacgcaatctgatagcgcaagtaacgaaagcaaaagtaatgattcaagtagcgttagtgctgcacctaaaacagacgacacaaacgtgagtgatactaaaacatcgtcaaacactaataatggcgaaacgagtgtggcgcaaaatccagcacaacaggaaacgacacaatcatcatcaacaaatgcaactacggaagaaacgccggtaactggtgaagctactactacgacaacgaatcaagctaatacaccggcaacaactcaatcaagcaatacaaatgcggaggaattagtgaatcaaacaagtaatgaaacgacttctaatgatactaatacagtatcatctgtaaattcacctcaaaattctacaaatgcggaaaatgtttcaacaacgcaagatacttcaactgaagcaacaccttcaaacaatgaatcagctccacagagtacagatgcaagtaataaagatgtagttaatcaagcggttaatacaagtgcgcctagaatgagagcatttagtttagcggcagtagctgcagatgcaccggcagctggcacagatattacgaatcagttgacgaatgtgacagttggtattgactctggtacgactgtgtatccgcaccaagcaggttatgtcaaactgaattatggtttttcagtgcctaattctgctgttaaaggtgacacattcaaaataactgtacctaaagaattaaacttaaatggtgtaacttcaactgctaaagtgccaccaattatggctggagatcaagtattggcaaatggtgtaatcgatagtgatggtaatgttatttatacatttacagactatgtaaatactaaagatgatgtaaaagcaactttgaccatgcccgcttatattgaccctgaaaatgttaaaaagacaggtaatgtgacattggctactggcataggtagtacaacagcaaacaaaacagtattagtagattatgaaaaatatggtaagttttataacttatctattaaaggtacaattgaccaaatcgataaaacaaataatacgtatcgtcagacaatttatgtcaatccaagtggagataacgttattgcgccggttttaacaggtaatttaaaaccaaatacggatagtaatgcattaatagatcagcaaaatacaagtattaaagtatataaagtagataatgcagctgatttatctgaaagttactttgtgaatccagaaaactttgaggatgtcactaatagtgtgaatattacattcccaaatccaaatcaatataaagtagagtttaatacgcctgatgatcaaattacaacaccgtatatagtagttgttaatggtcatattgatccgaatagcaaaggtgatttagctttacgttcaactttatatgggtataactcgaatataatttggcgctctatgtcatgggacaacgaagtagcatttaataacggatcaggttctggtgacggtatcgataaaccagttgttcctgaacaacctgatgagcctggtgaaattgaaccaattccagaggattcagattctgacccaggttcagattctggcagcgattctaattcagatagcggttcagattcgggtagtgattctacatcagatagtggttcagattcagcgagtgattcagattcagcaagtgattcagactcagcgagtgattcagattcagcaagcgattccgactcagcgagcgattccgactcagacaatgactcggattcagatagcgattctgactcagacagtgactcagattccgacagtgactcagattcagatagcgattctgactcagacagtgactcagattcagatagcgattcagattcagatagcgattcagattccgacagtgattccgactcagacagcgattctgactccgacagtgattccgactcagacagcgattcagattccgacagtgattccgactcagatagcgattccgactcagatagcgactcagattcagacagcgattcagattcagacagcgattcagattcagatagcgattcagattccgacagtgactcagattccgacagtgactcggattcagatagcgattcagattccgacagtgactcagattccgacagtgactcagactcagacagtgattcggattcagcgagtgattcggattcagatagtgattccgactccgacagtgactcggattcagatagcgactcagactcggatagcgactcggattcagatagcgattcggactcagatagcgattcagaatcagacagcgattcagaatcagacagcgattcagattcagacagcgactcagacagtgactcagattcagatagtgactcggattcagcgagtgattcagactcaggtagtgactccgattcatcaagtgattccgactcagaaagtgattcaaatagcgattccgagtcaggttctaacaataatgtagttccgcctaattcacctaaaaatggtactaatgcttctaataaaaatgaggctaaagatagtaaagaaccattaccagatacaggttctgaagatgaagcaaatacgtcactaatttggggattattagcatcaataggttcattactacttttcagaagaaaaaaagaaaataaagataagaaataagtaataatgatattaaattaatcatatgattcatgaagaagccaccttaaaaggtggcttttttacttggattttccaaatatattgtttgaatataattaataattaattcatcaacagttaattattttaaaaaggtagatgttatataatttggcttggcgaaaaaatagggtgtaaggtaggttgttaattagggaaaattaaggagaaaatacagttgaaaaataaattgctagttttatcattgggagcattatgtgtatcacaaatttgggaaagtaatcgtgcgagtgcagtggtttctggggagaagaatccatatgtatctgagtcgttgaaactgactaataataaaaataaatctagaacagtagaagagtataagaaaagcttggatgatttaatatggtcctttccaaacttagataatgaaagatttgataatcctgaatataaagaagctatgaaaaaatatcaacagagatttatggctgaagatgaggctttgaagaaattttttagtgaagagaaaaaaataaaaaatggaaatactgataatttagattatctaggattatctcatgaaagatatgaaagtgtatttaatactttgaaaaaacaaagtgaggagttcttaaaagaaattgaagatataaaaaaagataaccctgaattgaaagactttaatgaagaggagcaattaaagtgcgacttagaattaaacaaattagaaaatcagatattaatgttaggtaaaacattttatcaaaactatagagatgatgttgaaagtttatatagtaagttagatttaattatgggatataaagatgaagaaagagcaaataaaaaagcagttaacaaaaggatgttagaaaataaaaaagaagacttagaaaccataattgatgaattttttagtgatatagataaaacaagacctaataatattcctgttttagaagatgaaaaacaagaagagaaaaatcataaaaatatggctcaattaaaatctgacactgaagcagcaaaaagtgatgaatcaaaaagaagcaagagaagtaaaagaagtttaaatactcaaaatcacaaacctgcatctcaagaagtttctgaacaacaaaaagctgaatatgataaaagagcagaagaaagaaaagcgagatttttggataatcaaaaaattaagaaaacacctgtagtgtcattagaatatgattttgagcataaacaacgtattgacaacgaaaacgacaagaaacttgtggtttctgcaccaacaaagaaaccaacatcaccgactacatatactgaaacaacgacacaggtaccaatgcctacagttgagcgtcaaactcagcaacaaattatttataatgcaccaaaacaattggctggattaaatggtgaaagtcatgatttcacaacaacgcatcaatcaccaacaacttcaaatcacacgcataataatgttgttgaatttgaagaaacgtctgctttacctggtagaaaatcaggatcactggttggtataagtcaaattgattcttctcatctaactgaacgtgagaagcgtgtaattaagcgtgaacacgttagagaagctcaaaagttagttgataattataaagatacacatagttataaagaccgaataaatgcacaacaaaaagtaaatactttaagtgaaggtcatcaaaaacgttttaataaacaaatcaataaagtatataatggcaaataattaatgcatggctgcaaagcaaataatgagtttgtcgtaaaaataacaacattttaaactagcaataaataatatcaaagtcatcatttcaatgatgcaatctagtatagtccacattctaaacaggtgtggactattacttttttcactttatattacgaaaaaattattatgcttaactatcaatatcaataattaattttaagctgaaaaacaataaaaatgttaagacaacgtttacttcaagttaattattatactgaaaattctggtatataatgctgttagtgaatataacagggaaattatattggttataatattgagtctatataaaggagaaataacagatgaaaaagaaattattagttttaactatgagcacgctatttgctacacaaattatgaattcaaatcacgctaaagcatcagtgacagagagtgttgacaaaaaatttgtagttccagaatcaggaattaataaaattattccagcttacgatgaatttaagaattcgccaaaagtaaatgttagtaatttaactgacaataaaaactttgtagcttctgaagataaattgaataagattgcagattcatcggcagctagtaaaattgtagataaaaactttgtcgtaccagaatcaaagttaggaaacattgtgccagagtacaaagaaatcaataatcgcgtgaatgtagcaacaaacaatccagcttcacaacaagttgataagcattttgttgctaaaggcccagaagtaaatagatttattacgcaaaacaaagtaaaccaccacttcattactacgcaaacccactacaagaaagttattacttcatacaaatcaacacatgtacataaacatgtaaatcatgcaaaggattctattaataaacactttattgttaaaccatcagaatcgcctagatatacacatccatctcaatctttaattatcaagcatcattttgcagttcctggatatcacgcgcataaatttgttacaccagggcatgctagcattaaaattaatcacttttgtgttgtgccacaaataaatagtttcaaggtaattccaccatatggtcacaattcacatcgtatgcatgtaccaagtttccaaaataacacaacagcaacacatcaaaatgctaaagtaaataaagcatatgactataaatacttctattcttataaagtagttaaaggtgtgaagaaatatttctcattttcacaatcaaatggttataaaattgggaaaccatcattaaatatcaaaaatgtaaattatcaatatgctgttccaagttatagccctacacactacgttcctgaatttaagggtagcttaccagcaccacgagtataaaaattggcactaagtttacgagatatgataaatacctattattttaaatatagtctacaatctatgtggttgtaggctgtattttttgcagtttatcaataaacacccatcaacaaattataccgtttttctactttgaaagttggaagtaacataatcttaaataaatatattattaattaagataaatataatactcaagattattgttaatagtttgttcatcgcaagttaattattgtttctaaaatattggtatataattttcaatggcgaagaaaacagggtgaaaaagtcggtttttatatcaaagcaaataagggagcataaacaaatgaaaaggaaagtattagtactaacaatgggtgtaatttgtgcaactcaattatggcattctaatcacgcaaacgcattagtaacagagagtggcgcaaatgatactaagcaatttactgaaattgtatcggaagagaaagttataacagttgaacatgctcaaattaatatttttcaatctaatagcaattcaaacttgatggagttcaacatattaacaatgggcggtaaatcaggagctatggttggttatagtgaaattgactcatcacatttcacagaccgtgacaaacgcgttattagacgtgatcatgttaaagaagcacaaagcttagtagagaactataaagatacacaaagtgctgatgctaggatgaaagccaaacaaaaagttaacacattaagcaaaccgcatcaaaactatttcaataaacaaattgataaggtttataatggattacaacgctaatccaaagtaaattataagttatacatctcgtttttaaatgacaatttatccccgtaaatattataaataatcttttcaaattccacatagatatagagacactaataaacctctttgtctcgatatgatagtctgcaacgattcatgttgtaggctttttaattttacaaataaggctaaatatataagttctggcacctaaaatatagaaaatacataaaagtaagtatagttattttattataattattaaatttttattaattaattgtaaaaatgtagaattataattaattaacgtttaatattaaaattaactaaaaagaaagaggtgttagttatgacagaatacttattaagtgctggcatatgtatggcaatcgtttcaatattacttatagggatggctatcagtaatgtttcgaaagggcaatacgcaaagaggtttttctatttcgctactagttgtttagtgttaactttagttgtagtttcaagtctaagtagctcagcaaatgcatcacaaacagataatggcgtaaatagaagtggttctgaagatccaacagtatatagtgcaacttcaactaaaaaattacataaagaacctgcgacattaattaaagcgattgatggtgatacggttaaattaatgtacaaaggtcaaccaatgacattcagactattattggttgatacacctgaaacaaagcatcctaaaaaaggtgtagagaaatatggtcctgaagcaagtgcatttacgaaaaaaatggtagaaaatgcaaagaaaattgaagtcgagtttgacaaaggtcaaagaactgataaatatggacgtggcttagcgtatatttatgctgatggaaaaatggtaaacgaagctttagttcgtcaaggcttggctaaagttgcttatgtttataaacctaacaatacacatgaacaacttttaagaaaaagtgaagcacaagcaaaaaaagagaaattaaatatttggagcgaagacaacgctgattcaggtcaataatgctcattgtaaaagtgtcactgctgctagtggcacttttataatttttagatcacgatatgatttattatcaattcagaattaaaaaagtaaatagtatcaaaagtaagtgtatttaatattagaaaataaaaattttaaatttagtattaaaatggaatgttactatatagttcaatgtgtattatcacagaaaataaaataatgctttacttctatatttaaaagtgtataatgaaagttaagtaataaagagcgtgaagaaaaatgtgagttatttatatagaatattctccttttcatttatgaatttgttacaaaatatttagtgcaaaagcacgacggaggtattcaatatgaataacggtacagttaaatggtttaatgcagaaaaaggttttggtttcatcgaaagagaagatggtagcgacgtattcgtacacttctcagcaatcgctgaagatggatacaaatcattagaagaaggccaaaaagttgaattcgacatcgttgaaggcgaccgtggcgagcaagctgcaaacgtagttaaaatgtaattttaacttattcaaacagtccttactatagggctgtttttttatgctttaaatcgataacagttggtgtggtaaaagcactagccgttatttttttgtccaataaatttagttggagatttaacaatatataatggttctaaaataaatcgaactgatggaaaagttttttacttttcatctgtccgacttttgattttgaatataaaaaagcgccaatacagaactttaataatgacgagaattaaagtctgtatatggcgataacaagaagtaatgttaaacactcaaaatgtttaacaataataggataccacatcgcataatatcttactacttaattaataatttaactaatcaactttttgttaattttttattaagactgattaattattgagaatatttattgtttttaaaatctcataataattcagtaatcttgtttttatttaaaaggcgaaacattaaaataattaaataaaaatattgcgtttaatttacagcgtcaaatatacttatttctaatgctttggggtctactgaaacaagtaaagaatgatcgatgttactaatattgccattctccaaatttatttctgtgagtatttggaagctaccattaggcaacggtttaacaatagacaattgcttttccgcttgttgtattaaaaaaggttttgtagattgattattaatatgccattcactcatgtatgtttttcactcctgctttaaaatagggttagaaagtttatagttgagacattcatgttcaaccaaaattttgttcgaattcaataaatgtcttgtttaaaatagaaatattgtaaatgttatcgtccaaaacttcaccagttaagtatttgttttgaattaaaatttggcagttagttaagaagtcttgataatcacgatcgcaaaaatagttttcacgtgcatctttagcatcgccaaaaaagttagcgactgtttctgtttctcctttattcgaacgttcaatatataatttgtaaaatttagctattgtatacttttgttctttagttagttcattcaaaatattgggcctcctgaaatatcatttgtaatctatacccaatttattgcaaaacacaaactaatttaactatttgatgaaactgtgttaataagctttaacaagccttagtttgtatggatctataaaattatctttaattgcatagggtgaaataatatgtagtccataacttttaactgatttttcacttacaccaaatttataagcttggtagataattttagtacaatacgtaaattttttgctgttcaaatttaatgtaactagataacgatgatttgtattctcatagtttttcttaacccattcagccgcttttttacctgcaccaggatagctgcaacgataaactttcatccaatcatttttgccacttgcataattatatttaaaagattcgaaggattgtgtagttggtttgtcgccaggcccctcaatttgtaaaatcgttttatcatcaatcgcgatactacaatgaccaaaaaatccccacatgacagggccttttgtaacaataatatcaccaggttgtaattggaatttgtcatcttgaatttctgaatacttattatctgcaattgtttttggtgagtttattggggatacgacaacgaataatataagtaaaattatcgttcgtttaatatagttcacttaaaagctccttgttgaagaaatatatgtaaatagtcttaaattagaattgtaatctttaataagcttgtaagactaaaacatatcttaaatattaaagtatgagagtgtgaaatgtctattaagaataaaaaacagtctgaaacatcattgagacgtttcagactggatataaaatgaatttcatttatagcacaccaaatataaatgtgtatattaatatagcgaatccaaaaatatagagaatgacagtgaaacttaaataggactcttttttagattctttgctagtttttttcattaatacgagtataaacgtagcggcaactaagaaaattaatgctagccaaaacagaattgcaaaatgtaaagacatgtgaaaccctccttatataccgtaattattaacctataaaactataaaaaataggataaatgtaatagagaacgagtacgatatttataaaaaataatatttcacttaaccagtttttagttatcattgcaatggtaaaggatacgatgagtatcacaccacaaatgataataccaggcaggagccaacataaatcatctaaatctttattatatgtgattaaaatattaaagataacaaaagtggtagtaataactatattgatagcatttaacaaaatgttattcatgactgacacctactagtataaaaatagcttcttaataaatatgataacactatttttcaataggtaaataaaaagtatagttatttttaaaatattatttgcagaatgctaaagtttattaattcaaacaagtgagcatatataggggtgtattgtattaatatgaaaagaatatttacatactaaaaactcttaaagttgtataattcgttaatatttttagaatcagatatcaaaaaaatgtgcaaaatcacttttgcacatttacaaatactagttttctgataagattaataataacactttaaatagcgcttaataaatgaagggggcaagtcttatgacgttttacaatttcatcatgggttttcaaaatgataacacaccatttggtatattggccgaacacgttagtgaagataaagcattccctcgattagaagaaagacaccaagtaattagagcatatgtgatgtctaattacacagatcatcaattaattgaaactacaaatagagctattagcttatatatggcaaattaatttgagtagtaccaattatgatgtattagtgcatcccaaatatcttttgttttaaagtttatttcatcatttcttatcgaaaatggtgtaataatgtctttatctaaccaagtgttgataagttcatttggtacaccatctaacaacatttcacttttactaattataaaacattcccagtcaagtgaaacattttgtggattcacataattacattgattatgattatccataaacactcactcctttaaaattctgtactcttcattgcgttttaccccgtcacattatcttttaaactaaaatcatcattacttatgaaaaaaatgtacatcaaaagcaaaggttttcgctaccgaaaaagtttaaataatggtttaatatatttggtactcattttaataaaaagagaatacattttgagctatcaatactttttattgaagaggtgttattgttggctaaaacgttatatataatgcgccacggacaaactttgtttaattttaagggactaattcagggatttggagattcgccgctaacagaacttggaattgctcaagctcaaaaggcacgtagttattatgaaactaaggggataaacttcgatttatatgcatcatcaacgcaagaacgcgcaagtgacacacttgaaaatgttgcacctaaccaatcgtatcaacgttttaagggactgaaggaatggcattttggaatatttgaaggtgagtcagtctatctatttgataatctatacaagcctgaggacttattcggagatcgaattgttcctttcaaaggagaggcaaggcaacaagttgaagaacgcattgtgaaaactttacatgacattatgtctcaaacaaagaataatgcattagtcgtgagtcatggaacaataatgggagtatttttaagatattgccttaaactagatgaagcattaaagcataatatcggtaattgtaatatcctgaaatttgaatatgacaatggaacatttaaatttgttgagttaattgatccaaatttataataaataaagcgttatacatagacacaagtatgtcttttgtataacgcttttaaaatacaactacataacgctttagaataataattgaataagtttttgtaatatcatcagagcaacaataataattattatgcttgatattttattgattattgttaataattttccggttttatcaattgatccaaccatttttcctaaaattgcgagtaaaaagaaccataaccatgaaacgctaatacaagcgattgtaaacgcaattttattgctgccactatataatgcagcactactaccaattactccaattgtatctaaaatagcatgtggattgagtaatgaaactgataaagcaaaacttacttgtttcattggagacataatttgagtttctccatctgttgagggtttatcatgccaaatggtccaagccatatacatcaagaaaattaaaccaactatataaataattgcttgaagtacaggtaaagacataataatgatagatactcctaccactgcaataataataagtaagctgtctgacaacccggctgtaattattgcaggcaatacatatctatattttggttgattagctccttggttaaaaataaatacattttgtgcacctaaaggtaaaattagaccaatcgctaagataaatccatgaataattgcggttaccattaagttttgacacccctaaaacatagaatattctgaaaaaacttattgttatcatatcaaataaaaaacaactactcaatagtagagtagttgtatgaaaaatagaacctatatgatttgaatttatgagaaatgtagaatatataaaactgtattacttattaatcaaatcataaaaaagccaatgttcatcgaaataggtatttccgattttaattgcatttttctcaaaaccaagaatgtcgaatcctagtgcactatagaaaactttagcacctatgttgtttgacacaattgatgtaagtaaagattcgtaattgttctgccgtgcataattaataatgaaattaatgagctcgctattaatcgatttatcgttattagtaacaaagttgtatttaattaatgatttatgttcttttccaacgtatcgaatttgttctaaggcagctgttgcgataagtgtttcgttttcataacagccaaatacaatacatttcggtgaaccttgatttaaaatgtcatgtattaaggtgtcagtcattgtttgactataatgtgaatcttgagtgaattcttcattgactgtcgaaacaagtctcttatactcattaaaatcattattcgttaatgttttaatttcaatcattactgacctccttaatcattattaagaaagattttgtactaaaaaaatttcttaattacatattaaaatgtttattaaaattttgcaatcactgatttatatgcacattcttgtaaatggattatcaatttaattatatttatttttaagttcaggaaattatggaattggttattggtcgacactggacttttatttgtagacggtatgcgaagaagtcaagccagtattggaaccggtcacatttatgatgactaaggtacaatcattttcagttaaatattgccagaaatttcaatcacgaatagaaaaaataaccaaccaaaaatttttggttggcaaatttgaattttatgtgaattttattaataacgttgaataatctctttaagttaatgctaatctacaacatttacatttaaatcgacattaatatttccttgagtcgcttttgaatatggacaaaattcatgagccatttgtaaatatttttcagcttcttcttgagatataacatttttaattgtcgcatcaattgaaacacttaatttaggactttctgagtctgaatcatcttctagtctcactgttagtgttacttctggatgagcatcacgcactttgttttgctttaaaattaggtcgaaagcaccgttgaagcaagatgcataacctgctgcaaataattgttcggggttagtagctttaccatctgcttgagcaggcggaacgatatcaatatctaatgctcgatcatcagtataaacatgtcctttacgtccgccaacattcgtcgctttagtttcataatgtattgccatacttataacctcctaatttaaaatacatttatgctttacccattcgaaaataccttaatcattttcatttatagcattgtttgattgaaggataaaaagttgttgtttacaataaaaataatgagtatctgaaatgagggattcactatgacacatgtggaagtagtagcgactatcgcgccacaattatctatcgaagaaactttaattcaaaaaattaatcatcgtattgatgcaatagacgtattagaattacgaattgatcaaattgaaaatgtcacagttgatcaagtggcagaaatgattacaaagctgaaggttatgcaagattcattcaaattattagttacgtatcgtacaaagttacaaggtggctatgggcaatttacaaatgactcgtatcttaatttaatatcagacttagcaaatatcaatggcatagatatgattgatatagaatggcaagcagatattgacattgaaaaacatcaacgaatcattacacatttgcaacagtataataaagaggtggttatatcacatcataatttcgaaagtacgcctccattagatgaattgcaatttatattttttaaaatgcaaaaattcaacccagaatacgttaaattagcagtaatgccacataataaaaatgatgtgttaaatttattgcaggcaatgtctacattttcagatactatggactgcaaagttgttggtatttcaatgtctaaacttggactaataagtagaacggctcaaggcgtttttggtggtgcgttgacttatggttgtatcggagtaccacaagctccaggacagattgatgttactgatttaaaagcacaagtgactttatactaataaaatgaattaggttgcttttgtgtaagtgctgtcttataattgagaagtattatcattgttcgtggaggagcgattttagatggaattacaacaagcaatagctaatagaagaagtgtgaaaaaatttaaaagagatatgcacatagatgacgcattgctatatcaagcaattgagaaagctgctgatgctccaaatcacggaatgagggaaccatggagagttgtgcatgttccgaaagacagattaggagatatgagtaaggatatttctaaatttgcatttcctaatgaattagataagcaacaatgtcattatgatgcagttacgaaactaggtggcatgttattgcttattttaaaaacagatccaagacaacgtcaaaatgatgaaaactactttgcatttggtgcatatgcacaaaatcttatgttgttactttatgaagcgggaataggtacatgttggaaatcgccattatatatctatgatcctaaagtaagaaaaacacttggtataaagaaagatgaagttcttgctggattcttatatttaacggatttagaaggagatatgcctaaagcaccacgtaaaaatagaaacttaattacattatattaatatgtataattatagaaacattaataaaagctgagtcatgaattgatggacatctatcgagttagagatttaatctaacttactagagtcggtacaataacagtctcagctttttattgtgcagtatatacacatttttattttagtatttatttaaaagtttctgctaaaaatgattcaacttgttcaggtgacttagcatttgctgaatgaaggtgtgcaattttatcgccgtttttaaatactagcaagctagggatacccataacttcattttcaacaactacatcttctaattcatcacgattaacagtataccattggtaatcattatattgttctacgattgggtcaatccataaatccatagcacgacagtctgggcaccatcctgcctcaaatttaacaattacaggtgtatcgctattaattacagatttaaatgattcattacttttgattgattgcattgtaacaactcctctagatagtttaataatttttattatagctaaatttatatcataataaaaaattttagcttcaaaatgaaagccttttgctttggaaaatgatatatttattttaaatacataaaggaggttgcagtcgtatgattaaattttaccaatataagaattgtacaacttgtaaaaaggcagcaaagtttttagatgaatatggcgtaagttatgaaccaattgatatcgttcaacatacacctacaataaatgaatttaaaacaataattgcaaatacaggcgtagaaattaataaattgtttaatacacacggcgcgaaatatcgtgagcttgatttgaaaaataaattacaaactttatcagatgatgaaaagttagagttgttatcatctgatggtatgttagtaaagcgtcctctagcagtaatgggcgataagataacattaggatttaaagaagatcaatataaagagacttggttagcgtaagtgaaatgtaagcgtttactaaatatctcgatatttagattcattacatgtaaaatgaaataagctatacaattgttaatttttataaatatagttgaatagcatctagccttatggcatcattaatgatgtaaagattaattaggaggggattctcttggcagtaccaaatgaattgaaatattcaaaagagcatgaatgggttaaagttgaaggtaatgtagcaataattggaatcacagaatacgcacaaagcgagttaggtgatattgttttcgttgaattaccagaaacagatgatgaaattaatgaaggggatacgtttggtagcgtagaatcagttaaaactgtatcagaattatatgcaccaatctctggtaaagtagttgaagtcaacgaagaactagaagatagtcccgaatttgtaaatgaatctccatacgaaaaagcatggatggtaaaagtagaaattagtgatgaaagtcagattgaagctttattaacagctgaaaaatattcagaaatgattggtgaataatcaccgtgtaactccttaatctaagattgaggagtttatttttagtctgagaaaataaatgatatgaaagaaaaattattaggtactattatttggagtattgctacattttattattcaagaatgatggaaataatgaatttagctattttaaaaataaaaattgggggaagttaatatgctaaacattcaagacgttagtcatctttctaaaaaggagcaaaaagcatataaccgtttcgtagaatctgtagaaaacggtaatttaccagtactaccatgtattgaaatggatctaaaagagatgcaagaagaaacattaaaccagagtaagattggtggaatgccatttttaaaatattttaaagatataccattagatgaaaataatgtaccaatggtattgctagcacagattaatttggatgatcttccagaacaacaagaattatttcctgtaaaagaagggatattgcagttttggattagttcagaagatcaaatgtatggaatgtctgaaaatttaaagggaaacaatataaactcaaggcttgtttatataaaagagccaattacagatttatcactcgaaaatattcaagcgcatttgaagtcattagatgctgataatgaggatatcccgttcagtggagcattttctatagaatttagattgtcgaaacaaactattacatgtactgattataagtacgatgaggacgtgcttgcattgtggaataaagtcaatccatccttcgcgctaaaatcaatgtttggtggttatgatgaattgatggaacctgtgtgtaacacatttactgctaaggaaccatttaatcaacttggtggttatccatattttgaccaaatagatccaagaacgaacgatcaagaactgaaaatgtatgatagagtcttactgcaaattgattctacaagagatggtaattcttcgattatatggggtgatttaggtattgccaatatcttagtgaaatctactgaccttgaggctatgaagtttgatgattacatgtattcatgggattgcagctaagagaatcataaaaatatattactttaataagtgtagtatctatagatcaatctagggagtgggacataaatgatattttcgcaaaatttatttcgtcgtcccaccccaacttgcattgtctgtagaaattgggaatccaatttctctttgttggggcccatccccaacttgcattgcctgtagaatttcttttcgaaattctctgtgttggggcccctgactagaattgaaaaaagcttgttacaagcgcattttcgttcagtcaactactgccaatataacttcgtagagcatagaacattgatttatgtcccagcctgttttcataagccacagctaatgtgtatttaaaaataggaatacatgagtaaaactcatgcataagaaatactaatttctaaagaaaaagtatttctttatgttggggccccgccaacttgcacattattgtaagctgacttaccatcagcttctgtgttggggccccgctataattgaaaagtttgttataggtgtattttcttttggttaactattgttaatataacattgtagattttaggatgttgatttttgacttagcctttgtctgcttatgttaaatgttccagctagtcaaacattgagtttgtaattattatattaagctagtttaaattttttgtgatttatgttttattcataccaattttgtgaaatgatacagtgacagatgtttattgattttaaagggtgatgatgatggctattgtaaataaagtgataattgttgaaggaaaatctgataaaaaaagggtgcaacaggttattgcagaaccagtcaatattatttgtactcatggaacaatgagtatagataagcttgatgatatgatagaatcactgtatgataaacaagtttttgtattagccgattctgatgacgaaggagatcgaattagaaattggtttaaacgttatttgagtgaaagtgaacatatatttattgataaaacttactgtcaagttgcgaattgccccaaacaatatttggcgcatgtactttcaaaacatggctttacttgtaagaaagaaacacctcttttaccgaatataaataatgaaaggttagttttagtaaatgaataattcattagacatcaaagatgtaactacattttatgaggaagacaaacatttaatctttggttatacaccaacgtgtggtacttgtaaggtttcagaaagaatgttagacattgctaatgaaatattgcagttaccattattgaaaatagatttaaacttttatcctcagttttgtaaagatatgcaaatcatgtctacgccgattttattgttgatgaataaagataaagaagtaaaacgaatttatgcatttaaatcggtgactgatttgttagaaaatttaaaatagttattgacgaaattttactaaggtgttaggattaatacaaattaaatgatgcgtaaactcttatcgagagtggtggagggatgtgccctacgaagcccggcaaccgtcttatatagaaatggtgccaattcacataaagttttaacttttgaagatgagagaaacaatactactattgctttctcaatttttctatcgatattgagaaagcattttttattttattaagcaacacagggaggaatcaacgtgattgaattaaaagaagttgttaaagaatatcggactaaaaataaagaagtccttgctgtagatcacgttaatttatcgattcgagcaggatcgatttatggcgtcattggtttttctggagcaggaaaaagtactttgattcgaatgtttaatcatttagaagcgcctacatcaggtgaagttattatagatggagaccatataggtcaattgtccaaaaatggattaagagcaaaaagacaaaaagtaagtatgatcttccaacattttaatttgttatggtcaaggactgtgttaaaaaatattatgtttccgcttgaaattgcaggtgtccctagaaggagagctaagcaaaaagcattagaacttgtcgaactcgtcggtttaaaaggtagagaaaaggcttatccatcagagttatcaggtggacaaaagcaacgtgttgggattgcacgagcgttagctaatgatccaacggtcttgctttgtgatgaggcaacaagtgcacttgatccgcaaacaacagatgaaattttagatctactactaaaaattagagaacaacaaaatttaacaattgtactaattacgcatgaaatgcatgtcattcgtcgtatttgtgatgaagttgcagttatggaaagtggtaaagtgatagaacaaggaccggtgacacaggtttttgaaaatccgcaacacactgtgacaaaacgatttgtgaaagacgatttaaatgatgatttcgaaacatctttaacagaattagagccattagaaaaagatgcatatatcgttagattagttttcgctggttcaacaacaaccgagcctattgtatcgagtctatcaactgcctatgatattaaaattaatattttagaagcaaatattaaaaatacaaaaaatggaacagtcggctttttagttctgcatattccatatatttcaagtgtagatttcggaaaattcgaaaaagagttaattgagcgacaagttaaaatggaggtgttaagacatgggtaaatcatttagtgaaattataaatgaaatgattacaatgcctaatattcagtggccagaagtttggactgcaatagtcgaaacactatacatgacagtcgtctcaactatatttgcatttatacttggtcttattttaggtgtgttattattcttgtctgctaaaggtaagtctatcggtgcaaggttattttattctatcgtttctttcattgttaacttatttagagcgataccatttattattttaattttattattaattccatttacaagtttgatacttggaacgataagtggtccgacaggtgcgttaccagccttgatcattggcgcagcaccgttttatgcaaggctcgtagaaattgcttttaaagaaattgataaaggtgtcatcgaagcggcttggtcaatgggcgctaatacttggacagtaattcgtaaagtccttttacctgaagctatgccagcgctagtgtctggcattacagttacagcaatcgctttagttggttcaacagcagttgcaggtgtaattggtgccggtggtttaggaaatttagcatacttaacaggtttcactcgaaatcaaaatgatgtcattttagtatcaacagtttttattttaattattgtatttataatccaattcattggggattggcttacaaataaacttgataaacgataaattgggggtttcattttatgaaaaaattatttggtcttattttagtattaacatttgcagttgtattagcagcttgcggtaatggaaacaaaagtggcagtgacgacaagaaaataacagtaggtgcttcaccagcaccacatgctgaaattttagaaaaagcaaaaccattattagagaaaaaaggttatgaactagatattaaaacaattaacgattacactacacctaataaattactagacaaaggtgaaattgacgcaaactatttccaacatacaccatatttaaacacagagaaaaaggataaaggttacaaaatcgtaagtgccggtgatgttcacttagaacctatggctgtatactctaaaaagtataaaagtttaaaagaattaccaaaaggtgcaacagtctatgtgtctaataatccagctgaacaaggacgtttcttaaaattcttcgttgatgcaggtttaattaaaatcaaaaaaggcgtaaaaattgaagatgctaagtttagtgatattacagagaataaaaaagatattaagtttaataataaacaatcagcagaattcttacctaaaatttatcaaaatgaagacgctgatgctgttatcattaattcgaactttgcaatcgaacaaaaactaaatcctaaaaaagattctattgctgtagaaagtgcgaaagataatccttatgcaaacttaattgctgttaaagaaggacatcaagatgataagaaaatcaaagcattaattgaagtattacaatctaaagatattcaagacttcattaatgaaaaatacaatggtgcagttattcctgctaaataataccaattaaataaaaataccctttaataacaacgattaaggggttatttttgtggtattgaaaataaaaaagggcacaaaaggggcagtatatgcaaattatcgaattttaaacaaaaaaatacgctcagatttgagcgcattatccaagttttacctgttcaagtttgttcatcatatccttatccatctgttcagtaacgtgagaataaatggaaagtgttgtacggtggtcggaatggcctacacgatccataatagctttaagtgacacgccttgttgagagagtaatgatatgtggctatgtcttaatatatgtgaagaaacttctttatcaataccaacatctttagctgcttccctaaggattttattgaatctttcagtctgcattgggttgcctttatgattagtaaatacaaaatttctatttagatatccatcattccattttgaatcctttttgttctccagtattgctttctttaatatctcgcaacttctgctactcaatccaattgttctataactagactctgttttagtggtatcttttacaccgaatccaccagattcatcgtgaaaccaatggattgttccgttaatatttaaactcttattatcaaagtctatatcttcattttgaatggctaacatttcaccaatacgcataccatttaaggcttggaattctgtcatgagtgcaacgaataaataaaaccgcttatggatacctgagtgcatcttctgagccttcgtattaatatctttgatgatagattctatttcatttaattcgaggtacttattacgtttagctttcacttcatcataagacttaattcttttatttaatgttatatcttttaaaaattctaaatcttgcagtttatagatacgtctagtgtattcaaatacatttttgaatatgcttaacgcatctttgtttacttgatatacataacctttactatccatttcatcgaaaacttgttgcgcatatgaaagtgttattttattgattaaaatatcttcatctacaaatttcttcaaagtgtttagcttactcaatttagttttaatagttgttctttttgacccagacgttttgatataattctgaaaccactcatcacatgcgacatggaaagttagtgacttaagtgtagtaggtttcttatcattcagtttttcttctatacgctcatttaagagtctttgagcttctttttgtgattgcttaccattcttattaagtaccacgctaacacgtctccatttggcagtgagagggtctttgtacttctcgtaatatctatatttagtttctttattcttatttttaaatttttctaaccacattttgcttctccctcctcaaaattggcaaaaaataataagggtaggcatgctacccggaaaataatgattatgacataattaatagatttatatcgtttctttataagaaatatcgacatccaaatggaatttctcagactctacagttttattgtcttcgtaaatttttaaaaaactttttggtaacccatcatctcctgtgtagaataaatcatatgaaaaagtgtcattattatttaaatggaacgttactttaccaatattaaacccagaataaaattttgatttatgaccatattcttctccttttttagtgccgttatgtccataaatgttgtattcttcttgaaggtactttcttaatttgacatcaatctcttgagcggtaacaaattttttatttgtcgaaactttattggtagaaatagttttgtgatttccattgatccatatatttatagggatatttctaggtttatctagatattcgttagtagctgtgactccaccatatatgtatttattgttacactggccattataactaataccaaaaacatcaagtttttttcccttgaaattactaaatttattaaaatcttttgattctgaaattaaatcataagatacatttgaaaattgtagttgattagctataggagtatcattgtcttttacatcttttaaatctacaaagtctttttttgtataaaaattcctgagattatcaattcctatatcaccttgagcgctggcactattagagacacttaaagttattatatttattaatatgataactattaattttttcattgcattttctccttaaattctatttattcagtcttctcatatgaaatctctacatccaaatgaaaattctctgcatctatagttttattatcattgtaaatttttaaaaaactctctgcttgaccagttccggtgtaaaacaaatcgtatgtaaaagaagtttcattatttaaatggaaagtaatttttcctttgttaaatccagaattaaattttgactgatatccatattcctgacctttttttgttttattaaaaccatatatattgtattcgttttgtaggtattttcgtaacttaatatcaatctcttgagcagttacctcttttttttgagtagaaacctcgtctgtagatatagtgttttgcttaccattgacccagagattaataggtatatttctaggtttatctaaattttgattcgccaacgtaattccgccatacatatattttgtattacaaagacctgagtaacttattccaaagatatctactttatgatcttttaatctcttcgcttcatattcattatgaaactgtgaatataaagtgtattttccatcaatatactctaattgatgagaagtagaaaaatttccagaactaactccttgaagcgtttctggttgataattagtataaaagtttctaaggttgattacccctacatcagcatatgctagattgttttttattaaaaatgtgaagaaaaacaagctaacagtgagtactctaaatattttattcattttcatttctcctttgttatatttctttatatttaaaaactctcaacggctcaaatgtaattgaatactcgccgtagtgggtaccaataccgtatatctttttatattgttctatcgcttctaatatgtatttttcactcagttgtaggtactcggacaactcatacaagttacgtacgccataattataagcttctacaatttcacgtaatggaacagctgagataaagccgtgtctacgtgcataattttcaaattttctattaatccattttgattggtctaaaatgttgccatacgtcaacttgtggtgggcaagttcctcatataacacttctgctttacgtgtttctgacaaatttttattaattaaaataaccccattgtcatagagaccctcaaaattacctaaagatttcccatcatcaattggtatctctttgttttcaataaccatcttttcgtataaatacatgcaataaccccttactgatttcgatgtgcttttctaactaactccgcatactttctaatttcaattaattcttcctctgtaaaatctccatctaagtgcgcggcgatagtatcttgttttgtagattcttcgcgttcagcaaatcctaataaatattctgtttttattccaagtactttcgcaaaatcttcagcacgattcaatgggaactctctagttaaatttaaatatcttgatactgctgattttgctacacctacacgacgagctaattcacttagtgacatattttgttctttcattgatgttttaattattgtgattatttcatcattagttctcatttcttgtatctcctgaattgaatatttgttcttatttgtgaacgatttgattataacaccgttcccaaaagaatacaatatataaggaagaaaaaactttttgaatttttttaagtaaaaattgttgacgaacgagaacgtaaatggtaaattgtaattagttctcgaacgagaacgataggaggtgtaaacgtggtactaaatttaaaaagattgagagcggaaagaatagcttgtggtattacgcaagatgaaatggctcacaaaatggggtggaaaacaagaacgccttatgcaaagagagaaaatggaatagtagatattggagcgaatgaatttattaaaatggcaaaaatattaggttatgaaacaaataacctagacattttttttaccaataacgttcccggaaaagaacgaaaaaacatcttaaaaggaggtgaattaaatgtctagaacaaaattgcatgatgtaccagctaaagaaaatacaattacagaaccaaagcaagttgtagtgaatcctttgtttgcgaaacctaatgcactagctagtattttgggaatttcatatagttcggtgaatcgcattttaaaagagtgggaaaaagattctaaaggtgttgatgatttatattactcgttatcatcaacaatgattgttatcagtattccgcgattcgaggagtacatgaaggcgcgtcataaaaaatggatgtaggaggcaaggcaatgaaaatgtacttaacttatatctgcttagtttcattgttaacaatattattactagcaatatctaacatgtatgtcgcttttagtgtgtacggcatgatggtaacttatggatttaatttaacaggagagattacaacgtgcaaaaacaagttattattacaaaaacagtagttggctggtacaacattaaagatactcaacataatttaatgttaaatataccgccaaaagtatttgaacagtactttcctgatgttagtaaagatgttcaagttgcgtgtttagaaatggatttatcaaaaattacagaaattaaaaataagaaaaaagtaggtagttaagatggaaatcaaacaaaaatatcaattatcaaaagtggttaaaatattagaagtagtattatacgaggaagataagtttcaatccgataaggactatcattatcaggataaagcattatatgaatatgctttaaagttagttcataatggattgttcaatattcttgctgaattagattttgaagatgaagcatttttaattcttgatgaagtaacaatgacgctaagtgatgtcatgaaagaaacacaacacgtttaccgttatagtgtcatagacgaaaaaggtgaacataaacatacaacagatcgcaaaggacacgtgattggaatgttagagtgggcattagattacattgtgggaaatattgaagtggaggaattataaatgaattgggaaattaaaaatttaatgtgtgatttaaagatattgaaagaaaagtttgaggatttaaaggataatcatggctcgcattttgaagatttatatctacatgagccaaatcataccttaaataaagacgatgctattaaagaaggattttcatatcatgagagacgtattcacaatgatcaaatgtttgatgcattagaaaaagcgtcatctttcgccgaccaaagccaagataacgcataaaaaaataaaaatttataaaatcataccattaatattttaacattagttgcattgaaaatacagagaaatcagattagaaaggaggcattctgtggcaattaagaaaaaagatagaattattggagttaaagaattagaaataccgcaagaattaaaattagtgcccaattgggtattatggcgagctgaatggaacgagaagcaacaaaattttggaaaagtaccatatagtattaatggttacagagctagtacaaccaataaaaaaacatggtgtgactttgaaagtgtaagtattgaatatgaagttgatgagcaatatagcggtataggttttgtattaagtgatggtaataattttgtttgcctagatattgataatgcaattgataaaaaaggacaaatcaattctgaattagcactaaaaatgatgcaactcacatattgtgaaaagtctccaagtggtacaggattacattgtttctttaaaggtaaactaccagataaccgtaaaaagaaaagaacagatttagacatagagttatatgattcagcaaggtttatgactgttacaggatgcacaattggtcaaagtgatatttgtgataatcaagaagtattaaatactctagttgatgaatattttaaagagaatttgccagcaaatgaggttgtgagagaggaatctaataccaatatacaattatctgatgaagatattataaacattatgatgaaatctaaacaaaaagataaaattaaagatctattacaaggcacatatgaatcatattttgagagttcaagcgaagcagtacaaagcttattacactacttagcgttttacacaggtaaaaacaaacagcaaatggagcgtatatttttaaactacaataatcttacggataaatgggaaagtaaacgaggtaatacgacttggggacagcttgagttagataaagctataaagaatcaaaagacaatttatactaaatcgatagatgaatttaatgttataccacaggggagtaaagatgttaaacagttgttgaatcaattggggcatgaagaaagaacaaaaatggaagaaaattggattgaagaaggaaaacgagggcgaaagcctacaacaattagccctataaaatgtgcatatattttgaatgagcatttaacatttatactttttgatgatgaagaaaatactaagttagctatgtatcaatttgatgaagggatatatacacagaacactacaattataaaacgagtgatttcctatttagagcccaaacataatagcaacaaagctgatgaagttatttatcatttaaccaatatggtagatataaaagagaaaactaactcaccatacttaataccagttaaaaatggtgtatttaaccgtaaaacgaagcaactagaatcatttacacctgattatatatttaccagtaaaatagatacatcgtatgtaaggcaagatatagtacctgaaataaatggctggaatatagatcggtggatagaagagattgcttgtaatgataatcaggttgttaaattattgtggcaagtaattaatgactcaatgaatggtaactacactcgtaaaaaggctattttctttgttggtgatggaaataatggtaaagggacgtttcaagaattattgtctaatgtaataggttatagcaatattgctagcttaaaagtgaatgagtttgatgaacgttttaaattgagtgtgttagagggcaagacagcagtaattggagacgatgtaccagttggtgtgtatgtcgatgattcttcaaactttaaaagtgtagttactggcgatccagtgttggttgagtttaaaaataaacccttatatagagcgacttttaagtgtacagttattcaatcaacgaatggaatgcctaaatttaaagacaaaacaggcgggactttaagaaggttattgatagtaccgtttaatgccaattttaatggcattaaagagaattttaaaatcaaagaagactatataaaaaatcagcaagtgctagagtatgtgctttataaagcaattaatttagattttgaaacctttgacattcctgatgcatctaaaaaaatgcttgaagtatttaaagaagataacgatccagtttatgggtttaaagtaaatatgtttgatcaatggactattagaaaagtgccgaaatatattgtatacgcattttataaagaatattgtgatgaaaatggctataatgcattgagttcaaacaagttttataaacaatttgaacattatttagagaattattggaaaactgatgcacagcgaagatatgacaatgaagaacttgctaagaggatatacaactttaatgacaatagaaattacattgaacctattgaaagtggaaaaaactataaatcgtatgaaaaggtgaagctaaaagcaatatagttgcaaccgaatgcaaccgaatgcaaccgaaaattttaaaacgggttgcacctataatcacagttatatcaagggtttagggcacttatgcaactgagcaactcaaaatctataacttattagtagaaaagtaaataaccaaaatataaataagaaatagtatcaaaaattatataaactaatttgtgtgatttcggttgcatagttgcaaaagtggattaaccccttgtgacagtaagaaaaaaattgcaactggaaaatttaaaacgagttgcatagctgtaaatttcagttgcacataatcggaagagacttgcagttatacaaaattgcctaagatactaaagttactaaaaaacgtttaagtcactaaaagatactaaaattctagaattcagtaaccacagtttttactttcatattagtctttttgacaaaaagttactgagttactataaattatttctttttagtagaaatgtataatagagaattaaggtaataaaagattatataaaataccgtgaattttcagtaactcagtaaccaacagcctgtatgtattgacatcactgtgtttacagtggttattgaaaaacataaattcagtggtttttagtatctaacgtggttgctttagtaactggatagattggaggactagagtaacatgaatagaaatagaatgaaacaaatcatcttagaatatataaagaacaatgacagcacttcatttgtagagattgagaatgtatttgaagaacaaggttttaaatacaaaggtaacggcgcatataccagtggcaaccataagaatattatattttggatgggttggaatgaagaagcgtttaacattgtggcagatttaaaacgcgacgggctaattgaaatgcaaatttgtccgccaatgtactatcttattgatggtaaaggtctaaggctaccaattgtaaagaataaaaatataaaaatagatcattggctaccagtaacatttagtttagtaaattaaaacatgcagataagcatttaaaatatcaagtatagatatgggagtgtgtatatttattaatcataaaagaatcgcatatcaaataatcaaacatacacctgtgaacgttcaattaatgaatacgaaatatataaatcgcgttgtaaggcgctatacaaaaaagcgtgctgattttgaacttattaaaatgtatatctatcagattaaaaggagagaggcaagacgtgctagatcatacaaatgaatctgtaaaacgtgtgtttaagtatagagataagcaagaactattaaataagtatcacgaattattagacaaatactttcttcataacatttcgttctatgaagaagataaaaacaacgaacgtatatatggtttagttgttcatactaaaaacaaattaggagatgaagattatgaaagagtttaaagaacaatttgggtatcaactatctaactttgatgatatggatattaaaggatatgccaatctatatcaaaaggatataggtaaagatgtaagtatgattgaacaggggttaaagcaattaagtattactgaaacagaagttttattaccagagcaaattaacaaaaaattattaggagtgttaaatatgaatgaagtaaatcaatcaagtaatacatgggtaggtaccttaacaaaacaattagttagtagtgagaataactttaatattcaagagttaccaactgcacgtaaagaagtatttaaagagttattggtgaattgtgagctacctcaatcactacgtgaggtgattaccattactgatgatgaacatgttgaatctataccatcactaacatacattaaagataagttagctactaacggtattgagctatcacttaatggcagtagtaaatactttgatagacgtgagggacatatctacacagaagtatcagacagtgtagttcatggctctgatagaacattagatgatctacttaaagagatatttattaatgagtgtgtcgcatatgaaacaacattgttattagataagaataattcaagtggtttaattgataaaggtaaccaagacttatcactttataatcaaggtatcaaagaagtaagtaacacatcaatatacgatggtatcaagcaagcgatgaaagatataccacaaacgtttaggcgtaatgtatctattgtgatgaacacagaacatcatgataagctcatcaaagagttggcacagatgggattaggtggacttgcaggtgatttaagtaacctatttaatgtgactaatgtagtggttactgatgatgcacatgatgtctttgttggagactttggacatgccatatatgctaaatacgaacctattatgtataacaaaaagaaacaagcattaaaaggtatttatcaatttgcattgaactatgtgtttgatataaaaataattccagagttattgcgcatagttaatattaaataaaaaaattatttaaataaaattttatagccccctgcccatcggcttaaaatgttttttcgccgggtaccggcgggggcccttcgcttgcaacgcggataaacttttatgaaagggggataacttgatttatccctttttcagatacttataaatattaaattcgatatgtaaaggtgtggttatttggtatctgactttgaaagcaatgataaaatcactgaagtagaacttttaatgcattacaatccgaaagtcattaatagcaaaattaaagcgatgagatcacaaatagaaagcttatatcacttgaacatgaaccatgtgatcacgaatgataacgatatgctggtatctgtatcatatccattagataaattagtactttatattatagaagagaaagataaacttgaatattacatgaaaacagctcaggataggctaaatttgtttaaaaatatcatcaaaaactattctgaaaatgaacaacaggatgttatgaggtacatgttaagtagtgggaaagttaaaaatgaaggagtcattgaacgtttaaaagtagatatttataaagttgaaagtagaaagcgtcaagaacgacaaaaccagcgagaagaattacatcgaatagagtttaataagcatttagaacaagttaaaaaagaactttcatagataagcatgatattaacgggaatattcctatattcattaatattggtgaatgggacggagatgatgaggaattagataaggcagtgcaagatgtatctaacgctaaccataatcatactgtgattgtggatgatataccgttagaggattgaagaaaatgaagctatgctatttataaattaatactaattagtttgataccatagcttatttactgagaaagtagacttaaatgtaacaacaccagtgtttattgataatattggtgggtttgaggagtagcaataaaataaaggaggtaattgtgtaaaatatctctttttgttatttcttatttatttacaaccgataaaattaaatgtattatatatataacgatctagccataactctattcgggttatggctacttttataggggtaaatttatgaagccatttgaaagtcataataaacaattgaaaattctaagaagaagaggaatggaagtaccgagtagtgctaaaagagatttagaaaatgaaaattattataatatcataaatggttataaagatttatttttagaactagatgttaatggtaattttttggttcctgataaatataagcaaggtactcattttaaagaagtcttttctttatacaaactagatagaaaatttaggaatgttttattagagtatttgttagtatttgaaactcatattaaatcaagaatttcatattattttagcgaaaaatatagagaaccacattcatatttatactttaaaaattattcatctgacacaagtaagacagatagcatcgtgaaaatggttgctacatttagctcggttatgagtaatagaaaaaataaaccattaaaacattatattaatactcataatggagtgccactatggatattggtgaattatttaactttaggtaatgtttcaaaaatgtattccaatttggatgatgatcttcgattggaagttgctaaagactataaaaggaaattggaaagagattataaaacacgtgttcaaataactccatcagatgtagacagtatactacaacaagcacatatgtttcgtaacgtgtgtgcgcatgaagaaagattgtatgattataaaatagacagggctaaaagtagagctaatatattcgccaattataacaaaatatacgataaagaatacgttcctacaatgaatggtagttatgtattcgatttgttgatttcactatgtctatttttgaataaacatgattacataaaattgatgaaaaatatggataaactaataagtaattattcacattctttctatacaattactatagatgacctatatacaaaaatgaattttccagatcaaacaaaaatactggatatgttataaaagatattttttaatgtcacttacgagtggcgtttttttattttaagacgctgagaaacgccctgtgttgcagtgagggatgagtgtgtatatagaaatagataaagtatagatatagatttagaaatagataaagtatagatatagatttagaaattataaattaatatttgagatactgcctcttaaaaaaagacaagttacattaaaaaagtaacctgtctttatctataactagtttatagtgattttatctatatcctttttaaacaacatcaatcgtttgttatcattatagacttcaccgactttagctgagattttagggtctttttcgtctttactatgaatagttactgtatcaccgtctttcacaatctgcttttcttttaatttatcagttaattttttccatgcatcatttgcgtcaaatctatctccattgggatttttccttgacaaatcaatgctttttacactatcgctattgatcggtttgttattagaattgctaagttcatttaaattggcggtaccttcaatactgttttcaccgccatttgctaatttataagtcactttgacattttcattatctgttttatcgataatattcgcttcttttaaagcgtctcttacatttttccacaattcgttatctgtcgtttgctcagcttttgcaacgttattaataccattataatttgaagaagaatgaaaacctgaacctactgttgttaaaactaaagcacttgctatcaatgtttttgttaatagttttttattcattttattttctcctataatttatttgcaatcgattacaaagtaattttacaattattatttatgtaaatcaattaaataattattaacaaagatataaaatattattattacaatatattaattttgagctggaaatattcgttatttatgctataatcattttagacacagcaatgtgttcaaattttcatctattcgtaagttagccttcgggctgactttttatttccattattcacatgttaatcttgttgttatttaggcaggtacttcggtacttgtctatttttttatgttataattacatgtgtatatagtaggagtgaactatatagcccggcagaggccatatatctggctgttggtctcacaggagacatcttccttgtcatcactcatatacatatatcttgataacatagagttgttatagtcgctacgccactcatactagttactgggtggttgtttttatgttatattataaatgatcaaaccacaccacctattaatttaggagtgtggttgttttcaagggcaaaaaaagggcataattttgaaacaaagggcaagggtatgaataataaattatcttgaaaattttataaatgcatatataacaatgttttgattgcccttgaacttccttgataatctggctaattattcctgctaaataaatcatattaatggctcagtaacgtgatgttgctgggctttttaatttaaacaggtatttatatgatatttaggaatgagatgctattacggataaagtaaaatcctatatgcatgcgtgctactcatttattcttatttttaatttcacatggctagtgactaatacatcataaatcattagtgattctttattatttcagtcccactccctcaagttaatgatgaatctatttcgctagttataaaatgacgtcaaatcaatatcaaaaattatttaagtaaaatgtttagataatttttcagtgggtaagtattatatataacatttaattattccgaggaggcatttattatggcagacgaaagtaaatttgaacaagcaaaaggtaatgttaaagaaacagtaggtaatgttactgataataaaaatttagaaaacgaaggtaaagaagataaagcttctggtaaagcgaaagaattcgttgaaaatgcaaaagaaaaagcaactgattttattgataaagtaaaaggtaacaaaggcgagtaattttactttttattcctaatacactgcacatgccacttagtcggtataaccatcggctaggtggtttttgtattaaaaaagtggataccaaaatttattaataattattttaatgttagaaaaaaactaaataaaaactcgctaatgatatccaataatatgtatacaaaacgagacatatattgcatatgattaacgagatactgaaaatattttatcacccctaaaatgattattcattttcagcggtaattcgacctaaagtcaaacttacaataaaaccgatgataaatactactaatgaaacgaaccacatcacgatattagttggtaaacctggaaatactgcaaagagggagccaacaacaaaaccaatgattaatgcaaaagtcattagtttatgatgtgttaggaaatactggataattttgcttgaaataatgaatccagcaagcacgccaaatccgactgcaagtaatataggaagacctgcaaagttaagtttaacaacttcagatattgctagcatgaccgtaccatagacgccaaatactaataacataaatgaccctgaaatacctgggagtaacatagcactagatgcacacatacctgcaataaaatatttaataataagactagttgatagagtaagtgtttctccagcatgtttatcaccattattcattaatgtaataacaattaagatagcgataccagctataaccatcatgtaatgtttagttgtaaatgacgttttatagttagaaattttcaataaatatggaacgataccaatgattaatccaccaaagaaaaacatagttggaatatggtgttggcttaataaataattaaaaagattacttagtgatcccattgccagtaacattccaattataatggggattaaaaatgtaaaacttggccaaaaacgtcgtgagaatatgccgctaattgaagcgataaattgattgtaaatacctaacaataatgcgatagtcccaccgctaacaccaggtaccaagtcactcgttcccatagcaaaaccttttagaatattaatccatttaaattgttgcatgaataactcctttcaaacgattggaataaaatcataaatagcatcataccatattacaaatgtcctagtgaaatgataacatattttaaattcataaaatccattgagaaattatgtgcacttattatcatttatatttttaaagagagcggattagagttgtactttagagttattaaaaataataaaaagggtttaagttgtttatattaaggtataagtaagttataattaactgaacgcattattacaaagtctttttgactacaaattaaaattattataaactagttaagaaaactttatattttacggagggaatataaaatggcatcaacattagaaatcaaagacctacatgtgtctattgaggataaagaaatcttaaaaggtgttaacttgacaattaacactgatgaaatacatgcgattatgggaccaaacgggacaggtaaatcaactttatcatctgcaattatgggacacccaagctatgaagtaactaaaggagaagtacttttagacggtgtaaatattttagaattagaagttgatgaaagagcaaaagcaggattattcttggcaatgcaatatccatcagaaattacaggtgttacaaatgctgatttcatgcgttcagcaatcaatgcgaaacgtgaagaaggacaagaaatcaacttaatgcaatttattaagaaattagataaaaacatggattttctagacatagataaagacatggcacaacgttatttaaatgaaggtttctcaggtggagagaagaaacgtaacgaaatcttacaattaatgatgttagaacctaagtttgcaatcttagatgaaatcgattcagggttagacatcgatgcattaaaagttgtatctaaaggtattaaccaaatgcgtggggaaaactttggtgcattaatgattacacactatcaacgattattaaattacattactcctgataaagtacatgtaatgtatgctggtaaagtcgttaaatctggtggtccagaattagcaaaacgtcttgaagaagaaggatatgaatgggttaaagaagagttcggttcagctgaataatcttattaatacagtatccatgagatgttcatctatatatgatgaaaatgaacatttatacgaaatagtaaatttcatcaagtaggaggaaaaagttatgacaactgatattttgaacatttctgaagaacaacttgttgattattctaaagcccacaatgaaccttcttggatgacagaattacgtaaaaaagctttgaaattaacagaaactttagaaatgccaaaacctgataaaacaaaattaagaaaatgggattttgattcttttaaacaacacgatgtaaaaggtgatgtttatcaatctttatcacaattacctgagtcagtaagagaaattattgacgtagatcattctaaaaacttagtaattcaacataataatacgattgcgtacacacaagttgatgataatgcatcgaaagatggcgttatcgttgaaggtttagcagacgctcttatgaaccatagtgatttagtacaaaagtactttatgaaagatgcagtaacagtagatgaacatcgtatcacagcgctacacacggcattagttaatggtggcgtatttgtttatgttcctaaaaatgtagttgtagaacatccagtacaatacgttgtgttgcacgacgacgaaaatgcaagcttttataaccatgttatcatcgttactgaagaaagcgccgaagtcacatatgttgaaaattacttatcaaatgcatctggtgaaggaaatcaattaaatattatttctgaagtgattgctggtgcaaattcaaatatcacatatggctcagtggactatatggataaaggctttacaggtcatatcattcgacgtggtattactgaagcggatgcctcaattaattgggcactaggtttaatgaatgagggtagccaaattattgataatacaacaaatttatttggtgatcgttcaacaagttcacttaaatcagtagttgtaggtacaggcgaacaaaaaattaatctaacatctaaaatcgtacaatatggtaaagaaacagatggttatatccttaaacatggtgttatgaaagaacatgcatcgtctgtatttaatggtatcggctacattaagcatggtggaactaaatcaattgctaatcaggaatcacgtgtattaatgttatctgaacatgctcgtggtgacgcgaatcctattttattaattgatgaagatgatgtacaagctggtcatgctgcatcagtaggtcgtgttgatccagatcaactttactatttaatgagtcgtggtatttctcaaagagaagcggaacgtcttgttatacatggtttcttagatccagtagtacgtgaattacctatcgaagacgttaaacgtcaattgagagaagtaattgaacgcaaagtttctaaataatattttgaaaataaaagtttgtaatagatatagactgtcgatattggtataagactaatacaacgtcagtatttaaatgattaggatttttatttaagaaaggtcgtgaatgaagtggccgaacactcatttgacgttaatgaagtaatcaaggattttccgatattagatcaaaaagtcaatggcaaacgtttagcatatcttgattcaacagcgacaagtcaaacgcctgtgcaagtgttaaatgttttagaagattactacaagcgttataattcaaacgttcatcgtggtgttcatacattaggatcattggcaactgatggttatgaaaatgcccgtgaaaccgttcgtcgttttattaatgcgaagtattttgaagaaatcatttttacacgcggaacaactgcgtcgattaaccttgtagcacatagctatggtgatgcaaatgttgaagagggcgatgaaattgttgtcactgaaatggaacatcatgccaatattgttccttggcaacagttagcaaagcgtaaaaatgcgacattgaaatttataccaatgacagctgacggtgaattaaacatcgaggatattaagcaaacgattaatgataaaacaaagatcgttgctattgcacatatatctaatgtgctcggtacaattaatgatgttaaaaccattgcagaaatagctcatcaacatggtgcaattatcagtgttgatggggcgcaagcagcaccacatatgaaacttgatatgcaagaaatgaatgctgatttttatagttttagtggtcataaaatgcttggaccaacaggtattggcgtattatttggtaaacgtgagttactacaaaaaatggaaccgattgagttcggtggcgacatgattgattttgtaagtaagtatgatgcaacatgggctgatttacctactaaatttgaggcgggtactccattaattgctcaagcaattgggcttgcagaagctattcgctatttagaacgcataggttttgatgcaattcataaatatgaacaagaattaacgatatatgcttatgagcaaatgtctgcaattgaaggaattgaaatttatggcccgccaaaggatcgtcgtgcaggtgtaataacgtttaatttacaagatgtacatccacacgatgttgctacagccgtagatacagaaggtgtagcggttagagctgggcatcattgtgcgcaaccgttaatgaaatggttaaatgtgtcttcaacagctagagcgagtttttatatatacaacacgaaagaagacgttgatcagttaataaatgccttgaaacaaacgaaggagtttttctcttatgaattttaataatctagatcaattatatagatctgtcattatggatcattataaaaatcctagaaataaaggtgtattagataacgggtctatgacagtagatatgaataacccgacatgcggtgaccgtatacgactaacatttgatatagaagacggcattataaaagatgctaagtttgaaggtgaaggttgttcgatttcaatggcaagtgcatcgatgatgacacaagctgttaaaggtcattcacttggagaagcaatgcaaatgagccaagaatttacgaaaatgatgcttggtgaagactatgtgattacagaagaaatgggagatattgaagcattgcaaggtgtatctcaattcccagctcgtattaaatgtgccacattagcttggaaagcattggaaaaaggtactgttgctaaagaaggtaaagcagaaggtacgactgaagaagaatagaatgctgttaatcatagataattttgatattagacatataaaagtataaaaatttttataagatgtcatgtcattgttataatatggtttacatcatgaattaaaaacttacgcacgccgttgtaaatatatttttaaggagtgattgaaatggctaaaaaagcacctgatgttggggattataaatatggattccacgacgatgatgtgtccattttcagatcagaacgtggtttaactgagaatatcgttagagaaatttctaacatgaaaaatgagccggaatggatgttagatttccgtcttaaatcattaaaattgttttataaaatgccaatgcctcaatggggtggcgacttatcagaattgaatttcgatgacattacttactatgtaaagccttcagaacaagctgaacgttcatgggatgaagtgccagaagaaattaaaagaactttcgataaattaggaattcctgaagctgaacaaaaatatttagctggtgtttctgctcaatatgaatctgaagttgtttaccataatatggaaaaagaacttgaagaaaaaggtattatctttaaagatacagatagtgctttacaagaaaatgaagaattattcaaaaaatactttgcttctgtagtacctgcagcagataacaaatttgcggcgttaaactcagcagtatggtcaggtggttcgttcatttatgtacctaaaaatatcaaactagatacgccactacaagcttatttccgtattaactctgagaacatgggtcaatttgaacgtacattaatcattgctgatgaaggtgcttctgtacattacgtagaaggttgtactgcaccagtttatacaactagttctttacactctgctgttgtggaaatcattgtgcataaagatgcgcacgttcgttatactacgattcaaaactgggcgaacaatgtatacaatttagttacaaaacgtacttttgtttatgaaaacggaaatatggaatgggtagatggtaacttaggttctaagttaacgatgaaatatccaaactgtgttcttttaggtgaaggtgcaaaaggtagtacattatctattgcatttgctggtaaaggacaagttcaagatgccggtgctaaaatgattcataaagcacctaatacatcttctacaattgtttctaaatctatttctaaaaatggtggtaaagttatttatcgcggtattgttcattttggacgtaaagcaaaaggtgctcgttcaaatattgaatgtgatacattaatcttagataacgaatcaacatcagatacaattccatataacgaagtattcaacgatcaaatatcattagaacatgaagccaaggtttcaaaagtttctgaagaacaattattctatctaatgagtcgtggtatttctgaagaagaagcgacagaaatgattgttatgggattcatcgaaccatttacaaaagaacttccaatggaatacgcggtcgaaatgaaccgtttaatcaagttcgaaatggaaggtagtattggatagctttaaaccgcgttgttaagccattcttgacttccgaaaatggctattgataccattttgatactgaatataacaaaaagccacattactgtggctttttttgttttataactaaatcggattgatagataagctttgtacttatttatatcagttcgattttttgattggtgtaaaaaataatcattgatggtggataaagcgacaacacaaatacaacatgattgtggcattagagtgctggtctttattaaattaattgaaagctacatcaaatattctttagataattcgatattagttcgattaagattcgttgtataagtgagttaaaataagaaaactattaataatattaagttcactacagatgttgctaatggaccataagttttaaagacatcttcacttttataaccaacaatcgcatctaaaaattgaactaagatcattgcaatggatatagttatcaaaaatatagcactatgaatgactaaagaaaaaatagctaataaaaataaaggtaagcttcgactaagtgcataatatgcatttatattatggctagatgcacatgcttgaattgaataacctaaacttacactggcactgattattgtaaatattgctaaaacaaaatacatgttaatccttctttctatatttggatataaacaagtacttgtctaaagttatttaaaagataattagaataaatttatgagaaactggttgttatcattataatggtttcaaatgattataactatgtcataaactgaatttgttgaaatttttcattatgcaaatttattaataacaaacagctcgaactatagcatcattttactaatgaatgcattaaagtaactatgactaaaaatgcatattaattatcattattaagactattatatataatgaattttaactggtttattaaacgagaacgtcgggaattaagtaactacaataaaaataagatatgacaataaggagactacacgcgtgatcattgccataattatattgatatttatttcgtttttcttttcaggaagcgagacggcattaacggctgccaataaaacaaaatttaaaactgaagctgacaaaggtgataaaaaagcaaaaggcattgtaaagttacttgaaaaaccaagtgagtttattacaacgattctaattgggaataatgtcgcgaatattttattaccaacacttgttacaattatggctttacgttgggggattagcgttggtattgcatcagctgttttaacagttgttatcattttgatctccgaagtgattcccaagtctgtcgctgcaacatttccagataaaataacaaggcttgtatatccaattattaatatttgtgtcattgtgttccgtcctatcacattacttttaaataagttgacggacagtattaatcgaagtttatctaagggccaacctcaagaacatcaattttcaaaagaagaatttaaaacaatgttagcaattgctggacatgaaggtgctttaaatgaaattgagacgagtaggttggaaggtgtcattaattttgaaaatttaaaagtaaaagatgtagatacaacacctagaattaatgtgacggcatttgcttcaaatgcgacatacgaagaagtttatgaaacggttatgaataagccatacactagatatccagtgtacgagggagatattgataacattattggggtgtttcattctaaatatctgttggcttggagtaataaaaaagaaaatcaaattacaaactattcagctaagccattatttgtgaatgaacacaataaagctgaatgggtattacgtaagatgactatttctagaaaacatttagcaattgtgttggacgaatttggtggtactgaagcgatagtgtcacatgaagacttaattgaagaattattaggtatggaaattgaagatgagatggataaaaaggaaaaagaaaaactttctcaacagcaaattcaatttcaacaacggaaaaatcgcaacgtatctatataaggagcgaacagctatgtggaataagaatcgacttactcaaatgttaagtattgaatatccaattatacaagcaggtatggcaggaagtacgacaccgaaattagttgcatcagtaagtaacagtggtgggttaggcacaataggcgcaggttactttaatacgcagcaattggaagatgaaatagattatgtacgccaattaacgtcaaattcttttggcgtaaatgtctttgtaccaagtcaacaatcatataccagtagtcaaattgaaaatatgaatgcatggttaaaaccttatcgacgcgcattacatttagaagagccggttgtaaaaattaccgaagaacaacaatttaagtgtcatattgatacgataattaaaaagcaagtgcctgtatgttgttttacttttggaattccaagcgaacagattataagcaggttgaaagcagcgaatgtcaaacttataggtacagcaacaagtgttgatgaagctattgcgaatgaaaaagcgggtatggatgctatcgttgctcaaggtagtgaagcaggtggacatcgtggttcatttttaaaacctaaaaatcaattacctatggttggaacaatatctttagtgccacaaattgtagatgtcgtttcaattccggtcattgccgctggtggaattatggatggtagaggagttttggcaagtattgtcttaggtgcagaaggggtacaaatgggcaccgcatttttaacatcacaagacagtaatgcatcagaactactgcgagatgcaattataaatagtaaagaaacagatacagtcattacaaaagcgtttagtggaaagcttgcacgcggtatcaacaataggtttatcgaagaaatgtcccaatacgaaggcgatatcccagattatccaatacaaaatgagctaacaagtagcataagaaaagccgcagcaaacatcggcgacaaagagttaatacatatgtggagtggacaaagcccgcgactagcaacaacgcatcccgccaacaccatcatgtccaatataatcaatcaaattaatcaaatcatgcaatataaataatcgaccgcaatccacaaaagcacaagcacccccaaacattattttagtgcttgccatttttgtggattgcgtttctattttaccaatttaatcaaacgaaaacatcaagctgaagatcgccgaaagattttaatcaagcaaaaacatcaaactaaagttcgctgaaatgattatgataaaagttatatggtatgatgacattggtgatatatatgataaacatcggattaacaggttggggtgatcactattcattatatgaagatttagaacgccaaaccgataaacttaaaacatatgctggacattttccggttgtcgaattagatgcgacatactatgcgatacaaccggaaagaaatatattgaaatggataaaagaaacgcctgatacatttgaatttgtggtcaaaattcatcaagcactcacattgcatgcagactacaaaacatttgcagatacaaggcaagaactatttgatcaatttaagaatatgttagagcccttacatacacagaaaaaattagcaatggtattggttcaatttccgccatggtttgactgcaatgcacaaaatatcaaatatattttgtatgtaagacagcaattacaagcatttccaatgtgtgtagaatttaggcatcaatcatggtttagtgatgcatttaaagaacaaacattggcatttttaacagaacatcaaatcattcatgcagtagttgatgaaccacaagtgaaagatggcagtgtacctttagtcaatcgaatcacaaatgaaattgcgtttgtacgttatcatggacgtaatcattacggttggactaagaaagatatgtcagatcaagaatggcgcgatgtacgctatttatatgattataatgagcaagaattaatagacttggcacaaaaggcacaaatattagcacaaaaagctaagaaagtttacgtcatatttaacaataattctggtggtcatgcagcaaataatgccaaaacatatcagcgattattgaatatagaatatgaagggttagcaccacaacaattaaaattattttaagaggcgacgactatgttattaacaattacattattagttttaatcggaggtttgtcagcgattatagggtctatcgtaggcattggaggcggtattattatcgttccaacaatggtttacctcggtgttgaacatggattactacataatattacaacacaagtagcgatagggacgtcttcagtcattctaattgtgacaggactttcttcatcacttggatatttaaaaacaaaacaagttgatattaaaaatggttccatctttttatttggactattaccaggttcattgcttgggtccttcattagtagatatttaacatttgagtcatttaatttatattttggtatctttttaattttcgtagccattttattaatggtaagaaataagattaaaccgtttaaaattttcgataaacccaagtatgaaaagacttatgtagacgctaaaggtaaaacatatcattatagtgttccaccattgtttgcttttattacaacgtttttaattggtatattgacaggtttatttggtattggaggtggcgcactaatgacgccactaatgcttattgtatttagatttccacctcatgtagctgttggaacaagtatgatgatgattttcttttcaagtgtcatgagttctatagggcacattgctcaaggtcacgtagcttggggttatgcaatcattttaattatttctagttattttggtgcgaaaatcggtgtcaaagtgaatcaatcaattaagtcagatacggtagtaacattattgagaacagtaatgttgttaatgggtatatatttaattattcgtgcgttgatttaatacaactttaaaaggaggacgtcaatttgaggcttacaatttatcatacgaacgatattcatagtcatttacatgaatacgaacgcattaaagcatatatggcagaacatcggccacgacttaatcatccttctttatatgttgatctaggtgatcatgtagatttatccgcacctataactgaagcaactttaggtaaaaagaatgtggcattactaaatgaagcaaaatgtgatgttgcaacaatcggtaataatgaagggatgaccatttcacacgaagctttaaatcacctttacgacgaagcaaaatttatagtgacatgtagcaatgttatagatgaatcaggtcatttaccaaataatatcgtttcttcttatattaaggacatagacggtgtgaaaatactattcgttgcagcgacagcaccttttaccccattttatcgtgcactaaattggattgttaccgatccacttgaatctataaaagaagaaattgaacttcaacgaggtaaatttgatgtattaatcgtgctaagtcattgtggcattttcttcgatgaaacattatgccaagaattgcctgaaattgatgtcatttttggtagtcatacgcatcattattttgaacatggtgaaatcaataatggtgtactgatggcggcagctggaaagtatggtaattatcttggagaggttaatttaacttttgaggcacataaagtagtacataaaactgcaaagattattcctttagaaacattacctgaagttgaaacttcatttgaagaagaaggaaaaacgttaatgtccaattcagtaattcaacatccagtagtgcttaagcgtagtatgaatcacataactgaagctgcatacttattagctcaaagtgtttgtgagtatacacatgcacaatgtgccatcatcaatgctggcttactcgttaaagatattgtaaaagatgaagtgacagaatatgacattcatcaaatgttaccgcatccgattaatatggtaagggttagactttttggtgtgaaattaaaagagattatagctaaaagtaataaacaagaatatatgtatgaacatgcacaaggtttgggtttcagagggaatatatttggaggatatattctttataatttagggtacattcattctacagggcgttactatctgaatggagaagaaatcgaagacgacaaagaatatgtactaggtacgatagatatgtatacgttcggtcgttatttcccaacattgaaagaattaccaaaagagtatttaatgccagagtttttaagagatatatttaaagaaaaattattggaatattaaaaagtaagattattggattttcatttgtcatgaatttcgatataatgtttaaagatacacttaacaggagggtatgtgttgttatggcgacaaaaaacgaggaaatattacgtaaaccggattggttgaaaataaaattaaataccaacgaaaactatacaggacttaagaagatgatgagggaaaaaaatcttaatactgtatgtgaagaagctaaatgtcctaatatacatgaatgttggggtgcacgtcgtacagcgacatttatgattttaggtgccgtatgtacaagagcttgtcgtttttgtgcggttaagacaggtttacctaatgaacttgatttaaatgagcctgaacgtgtagctgaatcagttgaattaatgaatttgaaacacgttgttatcactgctgttgcgcgtgatgatttaagagatgctggttcaaatgtttatgctgagacagtacgtaaagttagagaaagaaatccatttacaacgattgaaattttaccatcagatatgggcggggactatgatgcgttagaaacattaatggcgtcaagacctgacattttaaaccataatattgaaactgttcgtcgcttaacaccgagagttcgtgcgcgtgcgacttacgacagaacattagagtttttacgtcgttcaaaagaattacaaccggatatcccaactaaatcaagtattatggttggattaggtgaaactatagaagaaatttatgaaacgatggatgatttacgtgcgaatgatgtagatattttaacgattggtcaatatttacaaccttcacgtaaacatttaaaggttcaaaaatattacacgcctttagagtttggtaaattaagaaaagtggcaatggataaagggtttaaacattgccaagctggacctttagtacgtagttcttatcatgcggatgagcaagtaaatgaagctgctaaagaaaagcaacgccaaggtgaggcacagttaaatagttaatatttaaccattaataaggcataaaggcttagtttgtacaaaacgaacgtgtcatagaagtaatcattatttttatgaaacactaaaagtataaactgagcctttcattgtcatagataggtgaagaatttgataaaagtagatcaacattactttgaattaatagaaaattatcgcgaatgttttaatgaagaacaatttattgctaggtattcagatattttagataaatatgattacatagttggtgactatggttacgatcaattacgattaaaaggtttttacaaagattctaataaaaaagcagagatgagtaaacgtttttcaaatattcaagattacatatttgaatattgtaactttggttgtccttactttgtattaagacatttgtctaaacaagaggttaaaaagttaatcgaagaagttcatccgtctgatgtgatagatgacgacaataaacttcaagatgtgaagattaagccaaccattcaagatactgaacattaataaaacccttagctagattgaaaatgggaatcatgcaattcaagcatggacctgtaatctagttaggggtttttatctttaatgaatgacttcatttaaatactcagtaatttcatcgccttcttcagcatttacacctaaaatatgagcgatatagccttcttcttttaaatcatcagtaccgataataccgaatttatttgtttgcatattaagtacgagtgtcttaccataatgtctatttgtatggactaacatcaaatcatatcgactatgctcgccaacaaaaccaacaaactgaacttgactctcttcgttgtcatcatataaatacatatcaatcattttgtagcgactccttttaaaagtagtaaagttagtataacgacaaatgaagtatactgcaaaattatgataatatataagtgagaggtgacaaggaatgtattttgtagacaaagataaactaactcagaaattagcctatttacaagcattaactgatgattatcatgagagcaagcacaatcattatgcatttgaacgcattgctcaaatgttgatagaatcatcggtagatatagggaatatgattatcgatgcatttattttaagggatcctggtaattataaagatgtgattgatatattagaactagaaaatgttattactaaagaaacacagcaggcgattaataaaactgtcggtattcgtaaacaatttacatatgattacacagccttagatattaagattatcatgccaatgtttgatgacgcattaccttattacaaacaatttattacagaagtaacgacatttttacatcaagaaaatgtaccagtaacagcttttggtaaaggagaaaatcaataatgaaacagtataaagcgtatttaatcgatttagatggcacaatgtatatgggaacagatgagattgatggagcaaaacaattcatcgattatttaaatgtaaaaggcattcctcatttatacgtaactaataattcaacaaaaacacctgagcaagtaactgaaaaattacgtgaaatgcacattgatgctaaaccagaagaggttgtaacgtcagcgttagccactgctgattatatttcagaacaatcaccaggagcatcagtatatatgttaggtgggagtggtttaaatactgcgttaaccgaagcgggacttgtcattaaaaatgacgagcatgttgattatgtagttattggacttgacgaacaagttacatatgaaaagcttgcgattgcaacgttaggtgtaagaaatggtgcaacatttatttctacaaatcctgatgtatcaattcctaaagagcgtggtttattacctggtaatggtgctattacaagtgttgtaagtgtatcgacaggtgtatcgccacaatttattggtaaaccagaaccgattattatggttaaagcattagaaattttaggattagataaatccgaagttgctatggtaggcgatttgtacgataccgatattatgtctggtattaacgtaggtatggatacgattcatgtacaaacaggtgtatctacgttagaagatgtgcaaaataaaaatgtgccaccaacgtattcttttaaagatttaaatgaagcaatagctgaattagaaaaatagatatagtcattttataaagtaggtgaattgatttggtaaaaatagttgtttcgaggaaaattccagataaattttatcaacaattaagtaaacttggtgacgttgttatgtggcaaaaatcattagtgcctatgcctaaagatcaatttgtgacagcacttcgtgacgcagatgcttgttttattacattaagtgaacagatcgatgcagaaattttagcgcaatcaccaaatttaaaagtaattgcgaatatggctgtaggatatgacaacatcgatgttgaaagtgcaacagcgaataacgtggttgtcacgaatacaccaaatgtacttactgaaacaactgcagaattaggatttacattaatgcttgctatagcacgccgtattgtagaagctgaaaaatatgtagaagcagatgcatggcaaagctggggtccttatttattgtcaggtaaagatgtcttcaattcaactattggaatatatggtatgggagatattggtaaagcttttgcaagaaggttgcaagggtttaatactaatattctttatcataatcgatcaagacataaagatgcagaggcggactttaatgcaacatatgtttcttttgaaacgttgttagcagaaagtgattttatcatctgtacagcgccacttacaaaagaaacacatcataaatttaatgctgaagcatttgaacaaatgaaaaatgatgcaatttttattaatatcggtagaggacaaattgtagatgaaacagcattaatcgatgcactagacaataaagaaattttagcatgtggtttagatgtattagcaaatgaaccgattgatcatacacatccattaatgggacgtgataatgttctgattacaccacacattggtagcgcatcagtaacaacacgggacaatatgattcaattatgtattaataatatagaagcggttatgacaaatcaggtaccacatactccagtaaattgaaaataagtatggtttttaatcattggtaaaacaagcaaagcaattgttaaatatgttatgcttgacttgcgaatgtatatatttgcgctgatgataattcaataacattataaactcgtcatattaatgtgatgagtttatttgattttgacgtatataacaaaattgttatatagactgtaattgtttattgtttaaataacctttaaaatgaatgatgttctcaacaaagtgtatcatttacaataattgagtgatgacaaccaattactatgttgaatctataaaattaaaattgaatttcattatgaatatcgatataatgaattgtaaaaaacaaattttaaaacgtattttatattgaacggtctttataaaggcgtttttactaagaactttaagaggtgcaatatgaaatctaaaagtaaacagccacctaataaatatgttgaagcattcaaaccatatttattaacactattgtatttggcaatatttattactttatatttaatttatggcagtggcgacacacacaataacttcatttataatgagttctaatgagggagacttaatatgacagatattattaacaagctgcaagcgtttgcggatgcaaatccacaaagcattgctgttagacacacaactgatgaattaacttatcaacagttaatggatgagtctagtaaattagcacatcgattacaaggtagtaagaaaccgatgattttattcggtcacatgtcaccatatatgattgttgggatgattggtgccattaaagcaggatgtggatatgtacctgtagacacttcaattcctgaagaccgtattaaaatgattattaacaaggttcaaccagagtttgtatttaatacgactgatgaatcatttgaaagtttagaaggcgaagtatttacaatagaagatattaaaacatctcaagacccagtaatttttgatagtcagattaaagataacgacacagtatacacaatctttacatctggttctactggggaacctaaaggtgttcaaattgaatatgcaagtttagttcaatttactgagtggatgttagaacttaataaatcaggaaatgaacaacaatggcttaaccaagcgccattttcatttgatttatctgtaatggctatttatccatgtttagcatcaggcggtacattaaatcttgtagataaaaacatgattaataaacctaaattattaaatgaaatgctaacagcaacaccgattaacatttgggtatcaacaccatcatttatggaaatgtgtttattattaccaacgcttaatgaagaacaatatggtagtcttaacgaattcttcttctgtggtgaaattctacctcacagagcagcaaaagcgttagtaaaccgtttcccaagtgcgacgatttacaacacatatggtccaactgaagctacggtagcagttacaagtattcaaattacacaagaaatcttagatcaatatccgacattacctgttggcgttgaaagaccaggcgcaagattatctactacagatgaaggtgaacttgttatcgaaggtcaaagtgtaagtttaggatacttaaaaaatgaccaaaaaacagctgaagtatttaatttcgatgacggtattcgtacatatcacactggtgataaagcgaagtttgaaaatggtcaatggttcattcaaggtcgtattgatttccaaatcaaattgaatggctacagaatggaattagaagaaattgaaacacaattacgccagtctgagttcgtaaaagaagcgattgttgtacctgtatataaaaatgataaagttattcatttaattggtgcaattgtgccaacgactgaagttacggacaatgcagaaatgactaaaaatattaaaaatgacttgaaatcacgcttaccagagtatatgattcctagaaagtttgaatggatggaacaattgccattgacttcaaatggtaaaattgacagaaagaaaattgcagaggtaattaacggatgattccatatggtgattttacattcttcttaattgctttaattgcattattaccagtcattatacttggatttttaggtaagcgaagttacatttataatggcgtagttacagcatttatgattgtgttaatcttttcttctgataaacataatctgtttgaccaaaagtatttaagtgttcaattaattagttttattatttacgtcgtatggcaagttttattgataatgttttattatcattcaaaaccaaaaaataattcattttcaaaatttgtaactgtaatggttttatcaatattgccattagcacttgtgaaagtgttacaaagtacatggttaggtggacatcagattcacttccatgaaagtaaattaattgaatttgttggtttcttaggaatttcttatgttacattcaaaagtgtgcagttaattatggaaattcgtgatggttctatcaaagaaattaaagtatggaaattaattcaatttatttcattcttcccaacgatttcatctggaccaatcgatcgttacaaacgtttcgttaaagacgataaaaaagtaccaacaggcaatgaatatcgtgaattagtattaaaagcaattcacatgattatgcttggtttcttgtataaatatattgttgcttactttattaacacatatgcaatcatgccgttacaattagacttacatggctttgtcaatttgtggttatatatgtacgcatacagcttatatttattctttgactttgcaggttatagtttatttgcgatagcatttagttatttattcggtattaaaacaccaccaaacttcgataaacctttcaaagcgaaaaatattaaagatttctggaatagatggcatatgacattatcattctggttcagagattgtatttacatgagatctttattctacatgtctcgtaaaaaattattgaagagtcaatttgcaatgtctaacgtggcattcttaatcaacttcttcataatgggaatttggcatggtatcgaagtgtattacattgtttatggtttataccatgcagcattgtttataggttatggctattatgaacgttggcgtaagaaacatccgccacgttggcaaaatggtttcacaacagcacttagcattgtgattacattccactttgtaacatttggctttttaatcttctcaggtaaacttatataataaaggagaatttaattatggaatttagagaacaagtattaaatttattagcagaagtagcagaaaatgatattgtaaaagaaaatccagacgtagaaatttttgaagaaggtattattgattctttccaaacagttggattattattagagattcaaaataaacttgatatcgaagtatctattatggactttgatagagatgagtgggcaacaccaaataaaatcgttgaagcattagaagagttacgatgaaattaaaaccttttttacccattttaattagtggagcggtattcattgtctttctattattacctgctagttggtttacaggattagtaaatgaaaagactgtagaagataatagaacttcattgacagatcaagtactaaaaggcacactcattcaagataagttatacgaatcaaacaagtattatcctatatacggctctagtgaattaggtaaagatgacccatttaatcctgcaattgcattaaataagcataacgccaacaaaaaagcattcttattaggtgctggtggttctacagacttaattaacgcagttgaacttgcatcacagtatgataaattaaaaggtaagaaattaacatttattatttcaccacaatggtttacaaaccatggtttaacgaatcaaaactttgatgctcgtatgtctcaaactcaaattaatcaaatgttccagcagaaaaacatgtctactgaattaaaacgtcgttatgcacaacgtttattacagtttccacatgtacacaataaagaatacttgaaatcttatgctaaaaaccctaaagaaactaaagatagttatatttctggttttaaagagaatcaattgattaaaatagaagcgattaaatcattgtttgcaatggataaatctccattagaacatgttaaacctgctacaaaaccagacgcttcttgggatgagatgaaacaaaaagcagttgaaattggtaaagctgatactacatcgaataaatttggtattagagatcaatactggaaattaattcaagaaagtaagcgtaaagttagacgtgactacgaattcaatgttaattctccagaattccaagatttagaattacttgtaaaaacaatgcgtgctgctggtgcagatgttcaatatgtaagtattccatcaaacggtgtatggtatgaccacattggtatcgataaagaacgtcgtcaagcagtttataaaaaaatccattctactgttgtagataatggtggtaaaatttacgatatgactgataaagaatatgaaaaatatgttatcagtgatgccgtacacatcggttggaaaggttgggtttatatggatgagcaaattgcgaaacatatgaaaggtgaaccacaacctgaagtagataaacctaaaaattaaaatacaaatagcacataactcaacgattttgattgagcgtatgtgctatttttatattttaaatttcatagaatagaatagtaatatgtgcttggatatgtggcaataataaaataattaatcagataaatagtataaaataactttcccatcagtccaatttgacagcgaaaaaagacaggtaataactgattataaataattcagtattcctgtctttgttgttattcataatatgttctgttaacttaatatctttatattagaatacttgttctacttctattacaccaggcacttcttcgtgtaatgcacgctcaataccagctttaagagtgattgtagaacttgggcatgtaccacatgcaccatgtaattgtaatttaacaataccgtcttccacgtcaatcaatgagcagtcgccaccatcacgtaataaaaatggacgaagacgttcaataacttctgctacttgatcaaacatcgttgtatcttcagtaggcatcaggcaagtctcctttcgagagatgaatttgataatctttattagtatattataatagatagtgtaataaaaatctatcaaaccaatgggggataaatatatggagcacgtgagtgtggtagtttatggggcagatgttatatgtgcaagttgcgttaatgcgccaacatcgaaagatatttatgactggctacagccgctattaaaaagaaaatacccaaatatatcatttaaatatacgtatatagatattacaaaagataatgacaacttaacagatcatgatttacaatttattgaaagaatagaacaagatgaactattttatccattaattacaatgaacgatgaatatgtagcagatggttatatacaaacaaagcaaatcactcgatttatagaccaaaagcttgtgaatgaataatatacacataactaaaagcaatgtcagtaatagtgtgaactgacattgctttttaattttaaccattgtgatatttatataaccaaagtacgccggattttaaaatagaagcgagtcgtcctgttacagtgcggtccatgatatatgcaaaaccttgcttatctcctaatgacccaacgataccttgtacctttagttccggcattttgtcaggtaatggttcatttagccattgctttttaagcacatcggcaatttgatcaccttgaacttcggctaactgagcacttggcgcatgtggtaaatcagcacaatcaccaactacatagacgttacgatatgttggtacttgatgatactggttaactatcacgcgtccattactatttatatcaatcggcaagttacgaacaacttcaacaggttgaattcctgctgtccatacaactaaatcaatatctttaggttcatcacagttatatattttaccaggttcaactttattaatatttgaatttggaacaacggtaacattatttttggcgaaccatttcgcaacatacttacttaatttttctggaaaatttcttaaaattcgcggcccacggtcataaagatatatttccaagtctgatctactttctcttaattcgctggcaagttctatgccgcttaatccagcaccaacgataccgactttagcaccttctggtagttcactaatactatggaaagtatcccgagcctttgagagtgtttgaatactatgtgtatattcttcggctcctggaacgttatgatatttatcttcacatcctaaaccaatgattagctcatcataatcaattttagaattaccgactgagacaatttgagcatctaaatctatgtcgttaatttcaccataaactgtattcacttgtggatgattagggaatttcatacgaacatctttatctgatttcgtgcccgcagctaaagcataaaattctggtttcaatccatgaaatggcatacgatcaactaatgtgactgtataatcttgtggtaaagaagtagttaaaatgcgtgacatgatacgcatattaccatatccgccgcctaacaaaactaagtttttcataatgaagtaccccttttatatgttaatatttactttaattttgaaaagatcaaagtgcatagatatatttgttaatgaacagttataaaatgcaagtgtctttgattcatcaataacccctaaaaaagtaaatatgtatttatatgcttattatatatttttttgaaaatgactacaaataaatatttgtactaactaaggcactattacataactgggataagaaacatcagttgttgctaattgagcacatcatgttaaaataccagttttaaaatgctataatattgtaacaaatgaaataagaaggtgaagtatgaatccgatcgtagaattttgtctctctaacatggcaaaaggtggagattatgtttttaatcaactggaaaatgacccagatgtcgatgtgttagagtatggttgcctgacacattgtggtatatgttcagccgggttgtatgctttagtaaatggtgatattgttgaaggtgattcgccggaagaattattacaaaatatatatgcacatataaaagaaacttggattttttaaggaggagttatcatgccaacagttatattaacagaagcagctgcttacgaagtaaaagatatgcttaaagcaaatgaaatgccagatggctatttaaaaattaaagtgaatggtggcgggtgcactggtttaacatacggtatgggtgcagaagaagcgcctggtgaaaatgatgaagtcttagaatactttggattaaaagtattagtagacaaaaaagatgcacccgtattaaatggtacgactattgattttaagcaatcattaatgggtggcggtttccaaatcgacaatcctaatgcaattgcttcatgtggctgtggtagttcatttagaactgcaaaagttgcaggtaatcctgaaaattgctaataaaataactttttaatggttaacccaatttttgggatacaaattgatatcaataacgattaaggacatatttgattatgtcctatttttgcgtaaagatattttgttttattaaaaagcttattgaaaattaagaatctgactataaatagtattttaaatgatcgtgatagcggatacatttttaatcgaaatcaggctacgaaaaaattaattaattttttcacaatctgactgaatcttgcttgaaaatataacataaaagctatagaattagtattggattaaaaatgtcttttttgtgaacatcacaggtttttacataatttaaaagacttaaataacaaaatgatgataaactagtatacattgtggtaaaagtagtaatgaccagttgttactagtaattatcagcatttggttaaaaaaatatgaaagcttaggtgaaattaaatggctcaagatcgtaaaaaagtacttgtacttggtgctggttatgcaggtttacaaactgtaactaaattgcaaaaagcgatatcaacagaagaagcagaaattacgcttattaataaaaatgaatatcactatgaagcaacatggttacatgaagcatcagcaggtacactaaactatgaagatgtattatatcctgtggaaagtgtcttgaagaaagacaaagtgaactttgttcaagcagaagtaacaaaaattgaccgtgatgctaaaaaggtagaaacaaatcaaggtatttatgactttgatattttagtagtagcattaggtttcgttagtgaaacattcggcatcgaaggtatgaaagatcatgctttccaaattgaaaatgttatcacagcacgtgaattatcacgtcatatcgaagacaaatttgctaactatgcagcatcaaaagaaaaagatgataacgatttatctatcttagttggtggtgctggattcactggtgttgaattcttaggtgaattaacagacagaattcctgaattatgtagcaaatatggtgtggatcaaaataaagttaaaatcacttgtgttgaagcagcacctaaaatgttaccaatgttctcagaagaattagttaaccacgcagttagctacttagaagaccgcggtgttgaatttaaaattgctacaccaatcgttgcttgtaacgaaaaaggttttgtagttgaagtagatggtgaaaaacaacaattaaatgcaggtacttcagtatgggcagctggtgtacgtggtagtaaattaatggaagaatcatttgaaggcgttaaacgtggacgtatcgttacaaagcaagatttaacaatcaatggttacgacaacatttttgttattggtgactgttcagcgtttatcccagctggagaagaacgtccattaccaactacagcacaaattgcaatgcaacaaggtgaaagtgttgctaaaaacattaaacgcatcttaaacggtgaatcaactgaagaattcgaatacgttgatcgtggaactgtttgttctttaggttcacatgacggtgtaggtatggtatttggtaaacctatcgctggtaaaaaagcagcattcatgaaaaaagtgattgatacacgtgcggtattcaaaatcggtggtatcggtttagcattcaaaaaaggtaaattctaggctttaaataaagtttcagctaaacacataaaattaaattattcatttataaagtccttcagtgtcactgaagggctttattgttgtacaatttgaagtgagtaacatatcaaatctaaggaggtacattatgaattttaaattaaataacacactaagcaacgaaataaatacattgattattggtataccagaacatttaaatcagttagagcgcattagttttaatcatatcgatattacagaatcacttgaaagactaaaacatcaacatattattggtagtaaagttgggaagatttatacaactgcatttgatgtacaagatcaaacatatcgtttaattacagttggtttaggaaacttaaagacacgtagttatcaagatatgttgaaaatatggggacatcttttccaatacataaagtcagaacacattgaagatacgtatttacttatggattcatttatttcaaaatatgatcagttatcagatgtattaatggcatgcggtattcaaagtgagcgtgcaacatatgaattcgatcattataaatcaagtaagaaggcaccgtttaagacgaatttaaaccttattagtgaatcattaattgaattagattttattcatgagggtatcagtattggccaatccattaatttggcaagagactttagtaatatgccaccgaatgtattaacaccacaaacatttgcagaagatattgttaatcattttaaaaatacaaaggtcaaagtagatgttaaagattatgacactttagtttctgaaggattcggacttttacaagcagtaggtaaaggtagtaagcataaaccgagattagtaaccatcacatataatggcaaagacaaagatgaagcaccaattgccttagttggtaaaggtataacgtatgattctggtggttatagtattaaaacgaagaatggcatggctacaatgaagtttgacatgtgtggcgctgcgaatgtcgttggtatcattgaagcggctagtcgtttacaactgcctgtaaatattgtcggagtgcttgcgtgtgctgaaaatatgataaatgaagcatcaatgaagccagatgatgtatttacagcattaagtggtgaaactgtagaagtaatgaatacagacgctgaaggtagattagtccttgcagatgctgtgttttatgcaaatcaatatcagcctagtgtgattatggactttgctacattaacgggtgcagcaattgttgcactaggcgatgataaagctgctgcatttgaatcgaatagtaaagtgatattaaacgatatattacaaataagttctgaagtcgatgaaatggtatttgaattaccgattactgcaaccgaacgtgcaagtattaaacacagtgatatcgctgatttagttaaccatacgaatggacaaggtaaagcgctatttgcggcaagttttgtaacacattttagtggtcaaacacctcacattcatttcgatattgcaggtccagcaacgactaataaagcttcatataatggtccaaaagggccaacaggatttatgattccgacgatagtacaatggttaaaacaacaataatttaattatttgcctgatacaacttgtgtcttgatatacatttctaatttaactcttgaaagtataaaggatcgcattgtatcaggcattttcattgttgtaagaaaatataaatcgcatatccttgtgagcataaatcaacttgactagcattgcaaaaaaatattataagcatatgttcattcagtcaacgactactaatattgcattttagaacttaggattttgattggtgttccaagcttgtaaaattgtttaatttaatgaaagctaaaattattttaagaaagacaattaactaaaaaataaagattattggtatagtttgctattgacaggtgttaaagctactgatactatgtagtctataaacgctttagttcgatagagtgataaaggatggttgtcatatgataaatgcagtagtaatagcagtaattttaatgattgtgctatgtttatgtcgattaaacgtagttataagcttatttatcagtgcgctagttggtggcttaatttcaggcatgagcattgaaaaagttataaatgtatttgggaaaaatatagtcgatggtgctgaggtagcattaagctatgctttattaggtggatttgcagcattaatttcatacagtggtatcacagactatttagtaggaaaaattataaatgcaattcacgctgaaaatagtcgatggtcaagagttaaagtcaaagtgacaataatcattgcattattagctatgagtatcatgagtcaaaacttaattcctgtacatattgcattcattccaattgtcatcccaccattgttaagtctgtttaatgacttaaaaatagatagacgtttaatcggtttgattatcggttttggtttatgtttcccgtatgtgttattaccatatggattcggtcaaattttccagcaaattattcaaagtggctttgcaaaggcaaatcacccaattgagtttaatatgatttggaaagcaatgcttattccttcaatggggtatattgttggcttacttatcggtttatatgtatatcgtaaaccacgtgaatatgaaacacgtaaaatttcagatagtgacaatgttacagagttaaaaccatatatcttaatagtaacaattgtagcaatactagctacatttttagtacaaacatttacagattcaatgatttttggtgcactggcaggggtactcgtattctttatttcacgtgcatataattggtatgaattagatgctaagtttgttgaaggtattaaaattatggcttatattggtgtagttattttaacagcaaatggatttgctggtgtaatgaatgctactggtgatatagatgaattagttaaaactttaacaagtattactggtgataataaattatttagcattatcatgatgtatgtgataggtttaattgtcactttaggtattggatcatcatttgcaacaattcctattatcgcatcattattcattccttttggagcgtcaattggactagatacaatggcattaatcgcattgattggaacagcgagtgcattaggtgactcaggttcgcctgcaagtgattcaacattaggaccaactgcgggattaaatgttgatggccaacatgatcatatacgtgatacatgtgtaccaaacttcttgttttataatattcctttaatgattttcggtactattgctgctatggtactataagcataaagaggtgaaaatatgactcatttattagagacatttgagatgtcaatagatcaccaggaagatggtttagttgttatttctatgcctgttactgataaagtaaaacaaccatttggatatttacatggtggggcttcgattgctttaggtgaaacagcatgttcattaggatctgctaatttaattgatacaaccaaatttattccattaggtttagagatgaatgctaaccatattcattctgctaaagatggtcgtgttactgcgacagctgaaattattcatcgaggtaagtcgacacatgtatgggatataaaaattaagaatgacaaagaacaattaattacagttatgcgtggtacagttgctattaaacctttaaaataaaagaactgctagctgaaatgttatgagatattcataactacggctagcagtttttttatgcgctatattgttgtagttttagaaatgcttgttcaatgcgttcggcagctttacggccacccataacatttctaccaaatggtcctaattctaagtctgcaaagcatcctgcgacaaatagatttggtatccattctaatttttcggaaataacagggtaattacattcgttgataggtgcatcataattttgtattaattgcttaataagtggttgtgacataaaatcttgttcaaaaccagttgcaaccataatctgttgatatggaacagaatcattttcagtgttaattacaccaccactaatttgagtgataggtgttttatgcacatttatacgaccatttttaatatgttttttaaggcgtaagtacagttcgtgaggcattgatcctttatgacgttcgcgttgtacaatggcatttctttcaggcatgcttttagtacttaaaaatgaagacatatttttcggacctaaccaaccaggatcagcatcaaagtcatgtatttcaatatctttatttagccataaatgaatctttttatcgttatcatgatttaacaatttaagtgcaagatgtgcagcagtaatgccgctaccaacgatatgatcggtcttatcatatactacttgatcaagttctttctcgaagatatgatttacattctgtttgtcttttaaaatgtcaggcataaacggaatatttgtactgcctattgcaataacgacgcaatctgtagtgataatttgtccatcttctaacttgatatgccatttgtcttcttgtttatctaaagtttgaactaaaccttgaaccaagcaatcctctaattgatattgtttagaagcatgtgcaatatgatccataaacattgtcaattcaggtcgttgataaggaccataaaaagcatttgtatattggtgctgtttagcgaattgttttagatggaacggttgtggatgtacgtgatgtacaatcggtgatcttaaataaggcatttctattcgatttgtatatgagttaaacctttggcaaaaagtttcgtgtgggtcaatgattgttaatcggtctgttgttaatccgcttgataatagtttttgtgcgattgcagttccctgtatgccaccgccgataattgtccaatgcataataaaacctctctctttttaaaacgtaatcgttacgatttataattattattatcataatacataacgacatgaaaggcaattaaattaaagagatatatgtagatagggcgaatctgtagtcaaagaaaaaatcattgaaaaagaggtaacaatgtcaaaagaaaacagcagtaaaatcattcctaatttggaatcatcttactgctgtttgttgttgatttatattcatgattttgttatataatctacaattttgtgtcttttaagtcttccgaaatttcatcgactttagtctttttagtataaggcgttttaatattatatgctgctttcataatcatatgacttgaaagaggacctgtaattaatacaaagataatcgcaacgattaattgcatatttacaaaaccttgagtagcaataaaatataaaaacgtaccaaatagtaatgacattgcacctaatgttgatgcttttccggcagcatgtgcacgtgaatatacatcttcaagtctcaataatcctatagctgctagggcgctaattaaagcaccgatgataacaaagataagtgcaagactaatcagtatgattttgatcatgttcaatcaccttacctttgtccataaatttagagaatactgcagtacctaaaaaagctaatataccaatcatcataataacgacaatcatgtatttaatatttaataaaatactgaataatgctataactgccattaattgaagaccaatcgcatctaatgcgacaacacgatcggcaagtgatgggcctagcacaacgcgaatgagcatagctaacatagaaatgacaactatgattaatgcaataacgataataacattatgattcattatatttcgcccacctctcttacaattttctctaatgatgttttaatactttctacttcttgctctttagttgaaaaatctatggcatgaatataaatttttgtacgatcgtcacttacaccaagcactacagtaccaggtgttaatgtaattaaattagacagcaagacaatttgccaatctttttttaaatctgtgtgataaacaaagaatcctggttcatttttaatcgaaggtttaataataattttcaaaacatcaaaattagctttaatcagttcgattaagaaaataataactaatttaataatacgatatagcgtgatgacataaaatctacctggtaacactctgtgtaagaggtaaacaagaactaggccaaagatgaaacctaacacaaagttatttgttgtgtaactatttgtcacaaacaaccaaaacactgcgataataaagtttaatactaattgtacagccatgttatttacctcctaatacagctttaacgtaggttgatggattgtagaatgtttctgcaccagcttttaccattggatataagtaatctgctgacaatccatataaaacagttatcacaactgcaacgattgcaatcgtagttaaatatttgacgtcgactttgttattaagatcatatccttttggttgaccgaaaaagccttgtaggaatatgcgaatgacagaatataatacgactaaacttgataataagacgatgacaccacttaaataaaatcctctttcaaatgttgattggacaataaaaaattttccataaaagccactgagtgggggaatgccagctaaacttaatgctgcgataaagaatgaccaaccaagtacaggatatcgtttaattaagccaccaaattgtcttaaatcagcagtgcctgtaattttaatcataattccgataagcaagaataatgcaagttttactaacatgtcgtgcaatgtatagtaaatagccccaatcatacctgactctgtcatcattgcaacgccgactaagatcacacctacagcaatcatgacattgtataggatgatttttttaatgttggcatatgcaacagcaccgacacaaccaaagatgatcgttaatagtgctaagaataaaatgacataatgtgaaaagcttacattatcactaaagaataggctcaatgttctagcgattgcataaacaccaacttttgttaacaaagcaccaaagaatgcaatgattggaattggtggtgcatagtatgcactaggtaaccaaacaaacattgggaatacgccagcttttgtagcaaaaacaaagataaatagtatgaaaacgatattgactaagccactgtcatgcgctgaaaggttagctaatttattgcttatatctgctagattcaatgttcctactactgaatataaaatcgctacacccattacgaagaaggatgacgatacaacgttaacaagaacatattttattgtttcttgtagttgaatttttgtagaaccaattactaataagaaataagatgacattaaaaatacttcgaaatatacgaataggttgaaaatgtcaccagttgtgaatgcaccaatgatacctattaacataaatagtactgaaaaataataataatatctttcacgttcaataccaattgtttggtatgaatataaaatcacaatagctgtaataataatactagtaattattagtagggcactgaatatgtctaatacaaagacaatactgtatggtgctttccatgaacctagctctacgcgtattggtccatgtttaacaacatttgctaaattgataattgccgcgaccaaggttaataatgtaccgcctagtgcgacataacgctttataataggacgctttccaataaagacaagtaatatggctgtaattactggaataactagcgttaacacaagcatattactttcaatcatcttctggaactcctttcatactctcaacgttatctgtgcctaattctttatatgttctaaatgctaatactaagaaaaaggctgttgtcgcaaaggcgataacgattgctgttaaaataagtgcttgcgggataggatcaacatagctttttacgttcgcttcataaattggaacagtaccatgtttaagtccgcccatagttattaaaaataaatttgctgcatgtgttaatagtgtagttcccataacaattcgtatcagacttttagacaaaacgagatagacactaattgctgtgagaataccactaacaaaaatcataataatttccactattcgttctctccaatcgaaataataattgtcatgacagtaccaactactgcacataaaacaccgaaatcaaagaatactgctgttgtcatatgaacaggttctaatataaataacggtatatcaaatgtgacatgcgtaaagaaatttttgcctaaaaaccaacttgcgataggcgtcgcaatacaaaaaactaatccgatacctatcaagattttaaaatctaatgggaaaattttacgcattgtttctatatcaaatgcaatcgtaatgataacaagtgaacttgcgaataataatccgccgacgaaaccgccaccaggtgtataatgtcctgctaagaaaagtgaaaaaccaaagaccattaccatgaaaaagataataactgcagcaaattgcaaaattagatcattttgttgtctattcatgatttttcacctcgttaccttgcgtttgacgctttttacgtaatttaatcattgtatatacagctaatcctgcgataccaagcacagatgactcgaataaagtatccataccacggaaatcaacaagtatgacgtttaccatgtttttaccgtgagctaaatcataaacgtgctcttgataaaacttagatatcgattcaaaatgtctatttccgtatgcaattaaaccgataataatgacggacaaaccaacaccaccagcaattaaagcattagtaagctggaatgagcgcttttcattataacgatttaaatttggtaagtggtagaagcataataagaacaatgctgttgaaatagattcaacgacaaactgtgtcaatgctaagtcgggtgctttaaagaatataaacaatacagacacagcatatccaactgcacttaacataatgatgctaaataatcttgatttagcgaaaagaattaaaaaggcagcacttaataataaaattacgatacaaacttcgaaaattctaatcggactaacgtctttaaaattaatgttgaaaggtactgagaatatagtgacaaatgttaataaaattaatgcaccaaaaatgataactaaattattacgtgaataatcggtaacatagctattcgtcatcttttcagagtagtttggaataacatttgcacttctgttgtaccaataattgaatgttagtttaccaggttgtcgttgcaacaatttcacccaataactaaatgtcacaattagtaagatacctaaaatataaatcactaatgttgataaaaaggcaggcgttaatccatggaacatatggaattcaacatcatcaattaccgtatgattaatcgaagatgtagctggttcaataatcgaattagttaaaatgccagggaataaaccaaatacaattactaatgtagctaaaatagctggtgataaaagcattaatattgatacttcgtgtgcttttttaggtaattgttcaggtttatattgtccgaaaaatatatgcattataaatttaattgaatatacaaatgtgaagacactgcccactataccaatgattgggaataggtagcctaatgtatcaacactgaataaatttgcttggcttgctgtaaatgttgtttctaaaaatgattcttttgataagaaaccattgaacggtggtacaccagccatacttaatgctgtaataacagtgattgtaaatgaaataggcataattgttagtaagccacctaatttcttaacatcacgtgtaccagtagaatgatccactgcacctgtaatcataaatagggcacctttaaatgttgcatggttgattaaatggaatattgcagccgtaaatgcagcagcatatattttgctatcatcgccttgatagtgataactaatggcaccgattccaagcatcgccataatcatacctaattgggatactgttgaaaatgccagtatacctttcaagtcttgttgttttgttgcgtttagcgaagcccagaataatgtaattaaaccaacgagtgtgacagtccatacccaaccttgcgatgctgcgaagattggtgtcattcgagcgattaaatataaccctgctttaaccattgttgctgaatgaagataagcactgactggtgtaggtgcttccattgcatctggtagccaaatataaaatggaaactgagcagattttgtaaaagcaccaatcatgattaaaatcatcgcaaaaatgaagaatgggctattttgaatttcagaagcatgttgaatcatgtactgaatgctaaatgattgtgttggtatagcgagtaagatgataccacctaataatgatagaccaccaaatactgtgattatgagcgatttttgagcaccatatatagatgcttgtcgttcgcgccagaatgaaataagtaaaaaactagaaaatgacgttagctcccagaataaatatagaataataacattatctgaaagtacgacacctaacattgcacccataaatagtaataaataacaataaaaattccctagttgttctgacttacttaagtagccgattgaatataatactactaaactgccgattcctgaaataagcaaactaaagagtaaacctaagccatcaagatataaatcaaagttcataccaaaatgaggcatccaatttaaggttttcattacagtattacctgacatcgtcgttttaattaatgtaagcatataaataaatatgacgatagggacaggtaatacgaaccatcctaaatgtatacgtttaaaaaatctatacaggataggaataatgagtgcgaatattaacggtaatatcaccgcaatatgtaacaaactcactatgttgtcctcctttaaaaaatatttatgttattcattatacatgaatgatatagttctgaaaaacgtacacactccttgttgtgctttattttcagaagtatttaaataagaagaaacacgtcattttttatttaaaattttctttgtattgaagtgaataatcttcttttaagcgtgctaaactagctaaagacatttcagcatgttttgtttgctgagctttaagtttagtttctaaatctgtaattgcttgttgaagtgaatcttcatagcgcaatacatcaacattgaagtcgcgtaattgtgaacgtttcgtatagcgtttttcaaaatggcttaatgctttgcggtcatggaaaaatacaccttcagtttcagtagggttatgtaaatcaccttgtttcgggtgtttgataacttgttcaactttaacaaggacatcgtctccattttcttcaacaatcgtgacaccatagctacctgttttgtgtgaaaatcgatatagcttcatgctattttcctcccttaaaagtatgttaatatatatgtatcataacatgaatggagaatataaatggctaactatccacagttaaacaaagaagtacaacaaggtgaaatcaaagtggttatgcacacaaataaaggtgacatgacattcaaattatttccaaatattgcaccaaaaacagttgaaaattttgtgacacatgcaaaaaatggttattatgatggaatcacattccaccgtgtcattaatgacttcatgattcaaggtggcgatccaacagctactggtatgggtggcgaaagtatttatggcggtgcttttgaagatgaattttcattaaatgcatttaacttatatggcgcattatcaatggctaactcaggacctaatactaatggttcacaatttttcattgttcaaatgaaagaagtacctcaaaatatgttaagtcaacttgcagatggtggctggcctcaaccaatcgttgatgcatatggcgaaaagggtggtacaccatggttagatcaaaaacatacagtattcggtcaaatcattgatggtgaaactacattagaagatattgcaaatacaaaagtgggaccacaagataaaccacttcatgatgttgtaattgaatctattgatgttgaagaataatatctaaacataattaactaccaacattttaaactcggataaagctaatttatgaatggattagtatatattccaacgaaaataaataaactaatatgatgagcaatctcaatatatttatcaagaaagcacagtttttaaatagatgtgtattttaaagataatagttgaggttgctttttatgtttttacagagaattgctattcaaatagtaaataaattgaaaacaaagtagctggatatcatattgatttagataggaatttgttgctaattttatttgtaaatccaagtttgtagaattcttattcatttataaaataatattcgtatgatttgatgttttaattagtccaccatttcgatttgtgctatgataatagtgttaagtaaacgaaataaggggttattaagttgaataactacaaaattggccaacatatcaaggtgcgtgtaactggtattcaaccatacggtgcgtttgttgagacccctaatcatactgaaggactgattcatatatcagaaattatggatgactacgttcataatttgaagaaatttctatcagaaggccaaattgttaaagctaaaattttgtctatagatgatgaaggaaagcttaatctatcattaaaggataatgattacttcaaaaattatgagcgtaagaaggaaaaacaatcagtattagatgaaatcagagaaacagaaaaatatgggtttcaaacacttaaagaacgcttaccaatctggataaaacagtcaaagcgagcaattcgaaacgactaaaggaacagataaatcgtaccgaaaatcatacaaagggtctgaaatgaaagtttcttagactataaaagagattagtatctattaaattttattagatactaatctctttttgtctacgataacgtaatatgattgattctatttacacgtacaaatggtttaaggtgacatatccattatctttgttagatagaatcgttgatttgcaatattgtatgtggatttgttttttttatttattttagaaatgagaactacaacttaaagtattaaacgaattgcaactatataaacagataattggagaatgaaaaaattacatgttatagtcaactcaataattttaaggaggaattaagtaatgaaaagtaaatacgaaccattgtttgataaagtagaattaccaaatggagtagagttgagaaatcgatttgtgttagcccctttaacacatatttcttcaaatgatgatggtactatttcagatgtagaacttccttatattgaaaagcgttcacaagatgttggtattacaattaatgctgcgagtaatgtgagtgatgtcggaaaagcatttccaggacagccatcaatcgcgcatgacagtaatattgaaggactaaaacgattagctacagcaatgaagaaaaacggtgccaaagcactcgtacaaatacatcatggcggtgcacaagcattgcctgaattaacacctgatggagacgtcgtagcaccaagtccaatttctttaaaaagttttggtcagaaacaagaacatagtgctagagaaatgacgaatgaagagattgaacaagcaatcaaggattttggtgaagcaacgcgacgtgcaattgaagcagggtttgatggtgttgaaatacatggcgcgaatcattacttaattcatcaatttgtatcaccatactataatagaagaaatgatgtatgggcaaatcaatataaattcccggtcgctgtgattgaagaagtacttaaagcgaaagaagcgtatggcaataaagactttatagttggatacagattatctccagaggaagcggagtctccaggaatcacaatggaaattacagaggaactcgttaataaaattagccatatgccaatcgactatattcatgtttcaatgatggatacgcatgcaacgacacgtgaaggtaaatacgctggacaagaaagactgcctttaattcacaaatggataaatggtcgtatgccacttatcggtattggttcaattttcacagctgacgaagctttagatgcagttgaaaatgttggtgttgacttagtagccattggtagagagctactactggattatcaatttgttgaaaaaattaaagatggacgggaagatgaaattattaattactttgatccagagagagaagataatcatcacttaactcctaatttatggcatcaatttaatgaagggttttatccattaccacgtaaagataaataagtgtttaactgttaccactaatgatattgtgtatgcaatttgttagtggttttcaatatttataaataaaaatattcttagtaaaatatacttttgattaagtgtaaaattatcaattcttttgcttgtaatcatttaagtaattatgtcattataaatgtaagggttttcaaaatagacaaatttaatgaaacttagtgattatttcatcttttttggtggaaaagtatctgctttgaaaactaatgtaattatttggataatgtttcatgtataatagttataaatgatgaaaaggggagatatgatgactaaatctgaaaaaattattgagttaacaaatcattacggagcacataattatttaccattgccaattgtcatttcagaagctgaaggggtatgggttaaagatcctgaaggcaataaatatatggatatgttatctgcatattccgctgttaaccaaggtcatagacatccgaaaattattcaagcattaaaagatcaagctgataaagtgactttagtttcacgtgcttttcatagtgataacttaggtgaatggtacgaaaaaatttgtaaactggcaggtaaagataaagctttaccaatgaatacaggtgctgaagcagtagaaacagctttgaaagcagcacgacgctgggcatacgatgttaaaggaattgagccaaataaagcagaaatcattgcatttaatggtaacttccatggtcgaacaatggcgccagtttcattatcttcagaagcagaataccaacgtggttatggtccgttattagatggatttagaaaagttgattttggagatgtagatgcattgaaagctgcaattaatgaaaatactgcagcagttttagtagaaccaattcaaggtgaagcgggtataaatataccgccagaaggatatttgaaagcaattagagaattatgtgatgaacataatgtcttatttattgctgacgaaatccaagcaggattaggtcgttcgggtaaattatttgctacggattgggataatgtaaaacctgatgtctatattttaggtaaagcactaggtggtggagtcttcccaatttctgttgtattagcagataaagaagtattagatgtctttacacctggctcacatggttcaacatttggtggtaatccacttgcttgtgctgcatcaattgctgcattagatgttatcgttgatgaggatttaccaggccgctctttagaattaggagattattttaaagaacaattaaagcaaattgatcatccatcaattaaagaagtccgtggacgtggtttgtttataggtgtggaacttaatgaaagtgctagaccatattgtgaagctttgaaagaagaaggcttattatgtaaagaaacgcatgatactgtcattcgttttgcaccaccattaattattactaaagaagaattggaccttgcacttgaaaaaataagacatgtatttcaataatgtcaaaaagttgtaacaatcagtttgtaagggctttaaaaaggaatacgttatgttacaatatgtttgaaagcgaaatcattaggtaaagaagaggcgaaaaggatcatgactgagaacaataatttagtaacttctactcaaggaattattaaagaagcattgcataaattgggatttgacgaaggaatgtacgatttaattaaagaacctttaagaatgttacaagtgcgtatccctgtacgaatggatgatggcacagtaaaaacattcacaggttaccgtgcgcaacataatgatgctgttggaccaacaaaagggggcgtgcgtttccacccagatgttgatgaagaagaagtaaaagcattatcaatgtggatgactttgaaatgtggcattgtaaacttaccatacggtggtggtaagggtggtatcgtttgtgatccacgtcaaatgagcattcatgaagttgaacgtttatcacgcggatatgtaagagcaatttcacaattcgtaggtccgaacaaagatattccagcaccagatgtatttacaaactcacaaattatggcttggatgatggatgaatatagtgcattagataaatttaattcaccaggtttcatcacaggtaaaccaattgtattgggtggttctcatggacgcgacagatcaactgcactaggtgtagttattgcaattgaacaagctgcaaaacgtcgtaatatgcaaattgaaggtgccaaggttgttattcaaggtttcggtaatgccggaagtttcttagctaaattcttatatgatttaggtgcaaaaattgtaggtatctctgatgcttacggtgcattacacgatccaaatggcttagatatagattatttattagaccgtcgtgatagttttggtacggtaacaaatttatttgaagaaacaatctcaaataaagaattgtttgaattagattgtgacattttagtaccagcggctatttcaaaccaaattacagaagacaatgcacatgatattaaagctagtatcgttgttgaagctgctaatggacctacaacaccagaagcaacacgtattttaactgaacgtggtatattattagttccagacgtattagcaagtgctggtggtgtaacggtttcttacttcgaatgggtacaaaataatcaaggttattattggtctgaagaagaagttgatgaaaagctacgtgaaaaattagaagcggcatttgatacgatttacgaattgtctcaaaaccgaaaaatagatatgagacttgcagcatatatcataggtattaaacgtacagcagaagcagctagatatcgtggttgggcataattaattatcatatgtgatttaacgagcttgggacagaaaacaaagccctaagctcgttaattttattttagcagtagttgactgtaaaacaatgcccgtgtaacacgctcttttcaaaaatagtcggggccccaacacagaggctggtggaaagtcagcttacaatagtgtgcaagttggcggggccccaacacagaggctggcggaaagtcagcttacaatagtgtgcaagttggggtggagccccgacacagagaaattagctcctcaatttctacagacaatgcaagttggcggggccccaacacagaagctggcgaaaagtcagcttacaatagtgtgcaagttggggtgggacgacgaaataaattttgcgaaaatatcatttctgtcccactcccaaaaagacagcagtaggataatttcaatttggaaatatcttactgctgttttttatagtaatagctatatttttgtatttatgttttctagtttaacattactacttaatgacttctttatatttatcagcgaaatttgtaaagacaccatcaacgccatatttatttaatcgtaacatatcagctttttcattcactgtataaggatgtactataaatcctaagtcttttaaatgatgggtattttgttcagttaaatctgtataatcaggacctaatccaatcgcataagagcgtatctcttttaagcgttggtcgttaaattgttgtagttcacctttatcaactaattttactaatggcacatgcttattttgacgatgaattttctttaaactttcgtcagaaaatgattgaatcattacatgtccattttttaatttattgttatttaaaaggtgatgctttttcaatgaagctaataattgttcttccattcctgggtatacatcaggtgactttgtttcaatataatagtttgcattcgggccataacgttctaaaatttcatctaaagtgggtactttagcatttttataacttgctcttgcgtattttggatattttttattaaaccaacttcctgcatctaactgttttaattcatcaagggtataatcctcaactttaccgtgtccatttgttgtacggttaacagtttcatcatgcatagcaactaaatggccatctttggtacgttgtaaatcaatttcgatataagatgcttttaactcattatgactcttatcatatgcttgaaacgtatgctcgggtgcatagccacttgcgccacgatgtgcgatagtagtgaatcgctcattcgttaaatttgtatgccattgaatagcctgaggtttatttgcaatttgatttgtttgttcagcgccagcagtaggtactgataaaaatcccatagtaaaaacagcagaagcagccataaatttagtgaagcttttcgaagagttagtcatagtctttatcctttcatctctttatttgtagtctaacaattttaaaatactacaaaaacctgcttgtgaaaacgctttacacatttcttttacaatttataacatttttgtaatataaatttaaaagaattatcaaacattttaggaatcttaaaaatgtgatgttcaacaagacgaagagagcattaaaatacccacaatgtaattttaatagacattgtgggtaggtagattaacgtatttattgtgatagtaattgtttagcaacatcaagttgttgtttgaccgatgattgacctgttgaaccgtaactttgacgtcgttttaaacaattttcaggctgcaaataatcgtaaatatcggcatcaatactagaatgatgttgttgatatgttgctaaaggaacatctaataaataatgaccttgttgtatacattctaagacgatttttcctacaatttcatgtgcagttctaaatggaatatttttagttactaaataatctgctagttccgttgcatttgaaaaatcttctttaacagtttgattgagtcgttctttattaattgtcatcgtttgaatcataccttcgaaaatacgtaaagaacctttaattgtatggacagcatcgaataaaccttctttatcttcctgcatatctttgttatatgctagaggtaatccttttaaagtcataagcatgctcattaaatgaccagtcgttcgaccaactttacctctaattaattctgccatatcaggatttttcttttgtggcataatagatgagccagttgaaaatgcatctgataatgtaatgaatttagcttcgtctgtggaccagaaaataatttcctctgcaaagcgtgataagtgaaccatcgttaaagaaatattatgcaatgtttcaataatatagtctctgtcactaacagcatctaggctattctcatagagactgccaaagttcaacaatgctgttgtctcgtgtctatcgatagggtatgtggtaccacttaaggctgctgcacctaaaggattaatatcgattcgttttaaactatcttcaaatcgttgttggtctcgttgtaacatccaaaaataagtcataatatgatgtgcaaatgaaattggctgtgcacgctgtaaatgagtataactaggcataattgtatcaacattattggaagcgatgtctacaattacactttgtaacgacttaattaatgcgatgatatcttgcacttgtttcttagtgtacaagtgcatgtctgttgcaacttgatcgtttctactgcgtccagtatgcaacttaccaccagcatcaccgatacgtttaattaattcatgttcaatatttaaatgaatatcttctaatgatgcactaaattgaatttgatcttgatgataatcatgttgaatagattttagtccttgtataatttgttcgctgtcttgttgactaataatgccttgattcgcaagcatagttgcatgtgcaatgctgccttcgatatcttgatctatgagcgtttgatcaaaagtaatggatgcgttaaagtcgtcaacccactcttcaggttgtacttcaaatctaccgccccaagctttattgctcattgctatagcctccatgcaacatcgcatttacttgagtaggtaaaccatagatatcgataaagccaacagcagcgtcttgattaaatgcatcttcttttgtataagttgctaatttttcatcatataatgtgtaaggtgattttctaccattcacgatggcattacctttgaataatttaattctgacatcaccacttacgtattgctgagtactatcaataaataatttcaagctatcagttaaaggtgagaaccaaagtccattgtatagttgttcagcaaattgcttctcaatgattggtttaaagtgtgcgacatctttcgttaacgtaatcgtttctaatgctttatgcgcttttaaaataacttctgcagcaggtgcctcataaatttctcttgatttgatacctacaagtctattttctacatggtcaattcttccgataccatgcttaccagctaatgcattcaacgttaaaattaaatcgtctaattcatatgttttgccatcaatttgaactgggatgcctttatcaaacgttaaaatgatttcatcagcagtatctggtgtttcttctaaagcatttgttagatcgaacgcatcctctggtggcgcagcataaggatcttctaaaataccacattcattcgctctgccccatagattttgatcgatagaataaggtgaatcatggttgattgatacagggatattatgtttaattgcataatcgatttcttcttcacgactccatgcccactcacgtacaggtgcgaatgctttcaatgatgggtttaatgctttaatggcaacttcgaaacgtacttggtcattccctttaccagtacaaccatgtgcaatacctactgaatttgttttctcagcaatctctactaattttttagcgattaatggtcttgataaagctgaaactaatggatatgcattttcatacattaaatttcctttgattgcataacttacatactcatcactaaattcttttgttgcatcaataatatgacattcaactgctcccatatctaaagcttttttataaacgatgtctaaatctttaccttcaccaacatctaggcaacaagctacaacgtcgtatcctttgtcgataagccattgaacggccacacttgtatctagtcctcctgaatatgctaaaacaattttctctttcataaaattcacctcattgtagttatctgaatatttcgtatgaacacatgatagcaaacttttaatgaaaataaaaccattattttacatatttattcataaaatgcgatagagatagttagagttgtaagtgtaaatgcttatttatcaatgtttaaaagtattttaaaaaacatgcaaattgtataaaaaatgtttgagtgtttgacgccagtttgaaatgtttgttgaaaaataggtgtgaaacgtcacataaatatcaattttattgattaagtacaaacttgtgaattgaatcgcaaacgtaaacttagtaaaattaagatattaaatgaaacaggaggcttttatagatgactcatattcaattagattttagtaaaacgttagaatttttcggtgaacacgaattaaaacaacaacaagaaattgttaaatcaattcacaaaacaattcatgaaggtactggtgcaggtagtgacttcttaggctgggttgatttaccagttgattacgacaaagaagaattttcaagaattgttgaagcatcaaaacgcattaaagaaaattctgatgttttagtagtcatcggtattggtggttcttacttaggtgcacgtgcagcaatcgaaatgttaacgtcatcatttagaaacagcaatgaataccctgaaattgtatttgttggtaatcacttatcatcaacatatacgaaagagttagttgattatttagcagacaaagatttctctgtaaacgttatttctaaatctggtacaactacagaaccagcagttgcatttagattgttcaaacaattagttgaagaaagatacggtaaagaagaagcacaaaaacgtatatttgcaacaacggataaagaaaaaggtgctttaaaacagttggctacaaacgaaggttatgaaacgtttatcgtacctgatgatgtaggtggaagatattctgttttaacagcagtaggattattaccaattgcaacagctggaattaacatcgaagctatgatgattggtgctgcaaaagcacgtgaagaattatcttcagataaattagaagaaaacattgcataccaatatgcgacaattcgaaacattttatatgcaaaaggttatacaacagaaatgttgattaactatgaaccatctatgcaatactttaatgaatggtggaaacaattatttggtgaatcagaaggtaaagacttcaaaggtatctatccttcaagtgccaactacacaactgatttacattctttaggtcaatatgtacaagaaggccgtcgcttcttattcgaaacagttgtaaaagtaaatcatcctaaatatgatattactattgaaaaagatagtgatgatctagacggattaaattatttagctggtaaaacaatcgacgaagttaacacaaaagcattcgaaggtacattattagcgcatactgatggtggtgttcctaacatggtagtgaacattccacaattagatgaagaaactttcggttacgtcgtatacttcttcgaacttgcttgtgcaatgagtggataccaattaggcgtaaatccatttaaccaacctggtgtagaagcatataaacaaaacatgttcgcattattaggtaaacctggttttgaagacttgaaaaaagaattagaagaacgtttataaaatacattacttcaaagattagtgaagtttgaaaagatagaactagacgttaactatttaaagcatattttcgaggttgtcattacaaatgtaaaaatgtaatgacaacctcgtttttatttatatgcaagaactaggttactagctaatgtgacaagatgttaagagaaaattaaagataaaataatatctgccttacaataatattgttatactactagagactgatttattagcatgattacatgttaatgtttctttacttagtaattaactttataatgtaagaataattatcttcaaccaaagaaagggattgatgatttgtcgtttcatcaagtagaagaatggtttgagatatttcgacagtttggttatttacctggatttatattgttatatattagagctataattccagtatttcctttagcactctatattttaattaacattcaagcttatggacctattttaggtatattgattagttggcttggattaatttctggaacatttacagtctatttgatctgtaaacgattggtgaacactgagaggatgcagcgaattaaacaacgtactgctgttcaacgcttgattagttttattgatcgccaaggattaatcccattgtttattttactttgttttccttttacgccaaatacattaataaattttgtagcgagtctatctcatattagacctaaatattatttcattgttttggcatcatcaaagttagtttcaacaattattttaggttatttaggtaaggaaattactacaattttaacgcatcctttaagagggatattaatgttagttgtgttggttgtattttggattgttggaaaaaagttagaacagcattttatgggatcgaaaaaggagtgacatcgtgaaaaaagttgtaaaatatttgatttcattgatacttgctattatcattgtactgttcgtacaaacttttgtaatagttggtcatgtcattccgaataatgatatgtcaccaacccttaacaaaggggatcgtgttattgtaaataaaattaaagttacatttaatcaattgaataatggtgatatcattacatataggcgtggtaacgagatatatactagtcgaattattgccaaacctggtcaatcaatggcgtttcgtcagggacaattataccgtgatgaccgaccggttgacgcatcttatgccaagaacagaaaaattaaagattttagtttgcgcaattttaaagaattagatggtgatattattccgccaaacaattttgttgtgctaaatgatcaagataataacaagcacgattcaagacaatttggtttaatcgataaaaaggatattattggtaatgttagtttacgatactatcctttttcaaaatggactgttcagttcaaatcttaaaaagaggtgtcaaaattgaaaaaagaaatattggaatggattatttcaattgcagtcgcttttgtcattttatttatagtaggtaaatttattgttacgccatatacaattaaaggtgaatcaatggatccaactttgaaagatggcgagcgagtagctgtaaacattgttggatataaaacaggtggtttggaaaaaggtaatgtagttgtcttccatgcaaacaaaaatgatgactatgttaaacgtgtcatcggtgttcctggtgataaagtagaatacaaaaatgatacattatatgtcaatggtaaaaaacaagatgaaccatatttaaactacaatttaaaacataaacaaggtgattacattactgggactttccaagttaaagatttaccgaatgcgaatcctaaatcaaatgtcattccaaaaggtaaatatttagtgcttggagataatcgtgaagtaagtaaagatagccgtgcgtttggcctcattgatgaagaccaaattgttggtaaagtttcatttaggttctggccatttagtgaatttaaacataatttcaatcctgaaaatactaaaaattaatatgaaacaaatacaacatcgtttgtcggttttaatactgataaacgatgttttattttgttagtaccacaataaaagctaagttcgaaatgaacttataataaatcaatcacaatcactttgtgttaaaatatgtgtcaaaggaagtgagggtttgtcatgacattacatgcttatttaggtagagcgggaacaggtaagtctacgaaaatgttgaccgaaataaaacaaaaaatgaaagcagatccgcttggagatccaatcattttaattgcgccaactcaaagtacatttcaattagaacaagcctttgtcaatgatccggaattaaatggtagtttaagaacagaagtgttgcattttgaacgattaagtcatcgtattttccaagaagttggtagttatagcgaacaaaagttatctaaagctgcaacggaaatgatgatttataacattgttcaagaacaacaaaagtatttaaaactttatcaatcacaagcaaaatattatgggtttagtgaaaaattaacagaacaaattcaagattttaaaaaatatgcagtaacgcctgaacatttagaacactttattgctgataaaaatatgcaaactcgaactaaaaataagttagaggatattgctttaatataccgtgagttcgaacaacgcattcaaaacgagtttattacgggtgaggattcattacaatattttattgattgtatgccgaaatcagagtggctaaaacgtgctgatatatatattgatggttttcacaacttttcaacgattgagtatttaataatcaaaggattaattaaatatgcgaagagtgtcacaattatattgacgacagatggtaaccacgatcaatttagtttatttagaaaaccatcggaagtgttacgacatattgaagaaatagcaaatgaactcaatatttctattgaacgtcaatatttcaaccaattatatcgcttcaataatcaagatttaaagcatcttgaacaagaatttgatgcacttcaaatcaatcgagtggcatgtcaaggtcatatcaatattttagaatctgcgactatgagagaggaaataaatgaaattgcgcgacgtatcatcgttgatattcgtgataagcaattacgatatcaagatattgctattttatatcgtgatgaatcttatgcttatttatttgattccatattaccgctttataatattccttataatattgatacaaagcgttcgatgacacatcatccggtcatggaaatgattcgttcattgattgaagttattcaatctaattggcaagtgaatccaatgctacgcttattgaagactgatgtgttaacggcatcatatctaaaaagtgcatacttagttgatttacttgaaaattttgtacttgaacgtggtatatacggtaaacgttggttagatgatgagctatttaatgtcgaacattttagcaaaatggggcgtaaagcgcataaactgaccgaagatgaacgtaacacatttgaacaagtcgttaagttaaagaaagatgtcattgataaaattttacattttgaaaagcaaatgtcacaagcggaaactgtaaaagattttgcaactgctttttatgaaagtatggaatatttcgaactgccaaatcaattgatgacagagcgagatgaacttgatttaaatggtaatcatgaaaaggcggaggaaattgatcaaatatggaatggcttaattcaaatccttgatgacttagttctagtatttggagatgaaccaatgtcgatggaacgtttcttagaagtatttgatattggtttagaacaattagaatttgttatgattccgcaaacattggaccaagtaagtattggtacgatggatttggctaaagtcgataataagcaacatgtttacttagtaggtatgaatgatggaacgatgccacaaccagtaactgcgtcaagcttgattacagatgaagaaaagaaatactttgaacagcaggctaatgtcgagttaagtccaacatcagatattttacagatggatgaagcatttgtttgttatgttgctatgactagagctaagggagatgttacattttcttacagtctaatgggatcaagtggtgatgataaggagatcagcccatttttaaatcaaattcaatcattgttcaaccaattggaaattactaacattcctcaataccatgaagttaacccattgtcactaatgcaacatgctaagcaaaccaaaattacattatttgaagcattgcgtgcttggttatatgatgaaattgtggctgatagttggttagatgcttatcaagtaattagagatagcgatcatttaaatcaaggtttagattatttaatgtcagcattaacgtttgacaatgaaactgtaaaattaggtgaaacgttgtctaaagatttatatggtaaggaaatcaatgccagtgtatcccgttttgaaggttatcaacaatgcccatttaaacactatgcgtcacatggtctgaaactaaatgagcgaacgaagtatgaacttcaaaactttgatttaggtgatattttccattctgttttaaaatatatatctgaacgtattaatggcgattttaaacaattagacctgaaaaaaataagacaattaacgaatgaagcattggaagaaattttacctaaagttcagtttaatttattaaattcttcagcttactatcgttatttatcaagacgcattggcgctattgtagaaacaacactaagcgcattaaaatatcaaggcacgtattcaaagtttatgccaaaacattttgagacaagttttagaaggaaaccaagaacaaatgacgaattaattgcacaaacattaacgacaactcaaggtattccaattaatattagagggcaaattgaccgtatcgatacgtatacaaagaatgatacaagttttgttaatatcattgactataaatcctctgaaggtagtgcgacacttgatttaacgaaagtatattatggtatgcaaatgcaaatgatgacatacatggatatcgttttacaaaataaacaacgccttggattaacagatattgtgaaaccaggtggattattatacttccatgtacatgaacctagaattaaatttaaatcatggtctgatattgatgaagataaactagaacaagatttaattaaaaagtttaagttgagtggtttagttaatgcagaccaaactgttattgatgcattggatattcgtttagaacctaaattcacttcagatattgtaccagttggtttgaataaagatggctctttgagtaaacgaggcagccaagtggcagatgaagcaacgatttataaattcatccaacataacaaagagaattttatagaaacagcttcaaatattatggatggacatactgaagttgcaccattaaagtacaaacaaaaattgccatgtgctttttgtagttatcaatcggtatgtcatgtagatggcatgattgatagtaagcgatatcgaactgtagatgaaacaataaatccaattgaagcaattcaaaatattaacattaatgatgaatttgggggtgagcaatagatgacaattccagagaaaccacaaggcgtgatttggactgacgcgcaatggcaaagtatttacgcaactggacaagatgtacttgttgcagccgcggcaggttcaggtaaaacagctgtactagttgagcgtattatccaaaagattttacgtgatggcattgatgtcgatcgacttttagtcgtaacgtttacaaacttaagcgcacgtgaaatgaagcatcgtgtagaccaacgtattcaagaggcatcgattgctgatcctgcaaatgcacacttgaaaaaccaacgcatcaaaattcatcaagcacaaatatctacactccatagtttttgcttgaaattaattcaacagcattatgatgtattaaatattgacccgaactttagaacaagcagtgaagctgaaaatattttattattagaacaaacgatagatgaggtcatagaacaacattacgatatccttgatcctgcttttattgaattaacagagcaattgtcttcagatagaagtgatgatcagtttcgaatgattattaaacaattgtatttctttagcgttgcaaatccaaatcctaaaaattggttggatcaattggtgacaccatacgaagaagaagcacaacaagcgcaacttattcaactactaacagacttatctaaagtatttatcacagctgcttatgatgctttaaataaggcgtatgatttgtttagtatgatggatagcgtcgataaacatttagctgttatagaagatgaacgacgtttaatggggcgtgttttagaaggtggctttattgatataccttatttaactggtcacgaatttggcgcgcgtttgcctaatgtaacagcgaaaattaaagaagcaaatgaaatgatggtcgatgccttagaagatgctaaacttcagtataaaaaatataaatcattaattgataaagtgaagagtgattacttttcaagagaagctgatgatttgaaagctgatatgcaacaattggcgccacgagtaaagtaccttgcgcgtattgtgaaagatgttatgtcagaattcaatcgaaaaaagcgtagcaaaaatattttggatttttctgattatgaacattttgcattacaaattttaactaatgaggatggttcgccttcagaaattgccgaatcataccgtcaacacttccaagaaatattggtcgatgagtatcaagatacgaaccgagttcaagagaaaatactatcttgcatcaaaacgggtgatgaacataatggtaatttatttatggttggagatgttaagcaatccatttataaatttagacaagctgatccaagtttatttattgaaaagtatcaacgctttactatagatggagatggcactggacgtcgaattgatttgtcgcaaaacttccgttctcgaaaagaagtactgtcaacgactaactatatattcaaacatatgatggatgaacaagtcggtgaagtaaaatatgatgaagcggcacagttgtattatggtgcaccatatgatgaatcggaccatccagtaaacttaaaagtccttgttgaagcggatcaagaacatagtgatttaactggtagtgaacaagaagcgcattttatagtagaacaagttaaagatatcttagaacatcaaaaagtttatgatatgaaaacaggaagctatagaagtgcgacatacaaggatatcgttattctagaacgcagctttggacaagctcgcaatttacaacaagcctttaaaaatgaagatattccattccatgtgaatagtcgtgaaggttactttgaacaaacagaagtccgcttagtattatcatttttaagagcgatagataatccattacaagatatttatttagttgggttaatgcgctccgttatatatcagttcaaagaagacgaattagctcaaattagaatattgagtccaaatgatgactacttctatcaatcgattgtaaattacattaatgacgaagcagcagatgcaattttagttgataaattaaaaatgtttttatcagatattcaaagttaccaacaatatagtaaagatcatccggtgtatcagttaattgataaattttataatgatcattatgttattcaatactttagtggacttattggtggacgtggacgacgtgcaaatctttatggtttatttaataaagctatcgagtttgagaattcaagttttagaggtttatatcaatttattcgttttatcgatgaattgattgaaagaggcaaagattttggtgaggaaaatgtagttggtccaaacgataatgtcgttagaatgatgacaattcatagtagtaaaggtctagagtttccatttgtcatttattctggattgtcaaaagattttaataaacgtgatttgaaacaaccagttattttaaatcagcaatttggtctcggaatggattattttgatgtggataaagaaatggcatttccatctttagcttcggttgcatatagagctgttgccgaaaaagaacttgtgtcagaagaaatgcgattagtctatgtagcattaacaagagcgaaagaacaactttatttaattggtagagtgaaaaatgataaatcattactagaactagagcaattgtctatttctggtgagcacattgctgtcaatgaacgattaacttcaccaaatccgttccatcttatttatagtattttatctaaacatcaatctgcgtcaattccagatgatttaaaatttgaaaaagatatagcacaaattgaagatagtagtcgtccgaatgtaaatatttcaattgtgtactttgaagatgtgtctacagaaaccattttagataatgatgaatatcgttcggttaatcaattagaaactatgcaaaatggtaatgaagatgttaaagcacaaattaaacaccaacttgattatcgatatccatatgtaaatgatactaaaaagccctcaaaacaatctgtttctgaattgaaaagacaatatgaaacagaagaaagtggcacaagttacgaacgagtaaggcaatatcgtatcggtttttcaacgtatgaacgacctaaatttctaagtgaacaaggtaaacgaaaagcgaatgaaattggtacgttaatgcatacagtgatgcaacatttaccattcaaaaaagaacgcatatctgaagttgagttacatcagtatatcgatggattaatcgataaacatattatcgaagcagatgcgaaaaaagatatccgtatggatgaaataatgacatttatcaatagtgagttatattcgattattgctgaagcagagcaagtttatcgtgaattaccgtttgtagttaaccaagcattagttgaccaattgccacaaggagacgaagacgtctcaattattcaaggtatgattgacttaatctttgttaaagatggtgtgcattattttgtagactataaaaccgatgcatttaatcgtcgccgtgggatgacagatgaagaaattggtacacaattaaaaaataaatataagatacagatgaaatattatcaaaatacgcttcaaacgattcttaataaagaagttaaaggttatttatacttcttcaaatttggtacattgcaactatagtattttgattttcaaaagaataaaaaataatttcgattaagtgcaaagtccttgtagcagaatgaacacaactcattttcaaaattgtcttacttatttatttgttatttgataacgaaaaaagttataatgtgaattaagataaagatgaggagttgagaatgaatgaaattcttatcattcaagtataatgacaaaacttcatatggcgttaaagtaaaacgcgaagatgctgtatgggatttaacacaagtatttgctgactttgcagaaggagatttccatcctaaaacattgttagctggtttacaacaaaatcatactttagattttcaagaacaagtacgtaaagcagttgtagcagcagaagatagcggcaaagctgaagactataaaatttcatttaatgacattgaatttttaccaccagtaacacctccgaataatgtgattgcttttggtagaaattacaaagatcatgcgaacgaattaaatcatgaagtggaaaaattatatgtatttacaaaagcagcgtcatctttaacaggagataatgcaacaattccaaatcataaagatattactgatcaattagattatgaaggtgaattaggtattgttattggtaagtctggtgaaaagattccaaaagcattagctttagattatgtttacggctatacaattattaacgatatcactgatcgcaaagcacaaagtgaacaagatcaagcatttttatcaaaaagtttaactggcggttgcccaatgggtccttatatcgttactaaagacgaactaccattacctgaaaatgtaaatattgttacaaaagttaacaatgaaattagacaagatggtaacactggcgaaatgattcttaaaattgatgaattaatagaagaaatttcaaaatatgttgcactacatccgggagatattattgcaactggtacaccagcaggcgttggtgcaggtatgcaaccacctaaatttttacaaccaggtgatgaagttaaagtgactattgataatattggaacgctgacaacttatatcgctaaataattatcatttaaaaagctaaccagtctttatatagattggttagttttttcttgcttttctaaaaaggtgttaaagataaattatttataatgttaccattttgagatgaaagtgaaatattgatattaagaagtagttgattattttacagcagattcacaatattctaataaggaataaaatgtcatgttcttcctctcaaatatagaagtgtggtagaatatatattcgtgtataatcaaatcatgattaaattacaagcaagtgggtattaatcccaagaagctttaatttaataatataaataattaaagtggggggaatcagtatgttacatttacatatattaagttgggtattagcgattattttatttatcgctacatacttaaacatttcaaaaaatcaaggcagatcaccatttttcaaaccgttgcacatgattttacgcttatttatgctgttgacgttaatttcaggattttggatattaattcagtcatttatgaatggcggggcaaatcatatgttgcttacattgaaaatgctgtgtggtgttgcagtagttggattgatggaagtgtcgattgctaaaagaaagagacatgaacaaagtcacacaatgttttggataacaattgcattaattatcatcacaatggtattaggtgtcattctaccgttagggcctatatcaaaattattcggtattggctaattgataagacatatagtatatgacataaggcatggacaattattagtccaagaccttatgtcttttttgattctaaaaatgttaaacataaaaaatggactggatagtagtaccagtccaacataattctaacctagacaattaagattagattgaatcgcatgattcatttatttagctttgtaaccaatcatattgattaaatctttagggtggctatatggtggtgcataagccacttcaaactcagttaactcatctacagttagctggttcatcattgccatcgatagtacatcaatacgtttatctgcaccttcttttcctactgcagctgctcttaaaatctgacggtttgaagtgtcataatatactcttaagtgtaaaggggaatttcctgggtaataattcgcgtgtgcaccttgagtgacttctaccattttatagtcaaattgctttagttcgtttggtttaacgccgacactcgcaaatgtataatcaaagaacttcacaatattgttgcctaagaagcctttgaattcaatagtgtcatttccagcaatttgttcggcaacaatacttgctgcacggtgagcgccccaagctaaaggaacactagccggtagatcgacatgtcgataatgtgatgttgcaatatcgcctattgcataaatgtttggaacatttgtttcaaatttatcgtttaccggtatgaaaccttttcgatcaagtttgatatttgaactttcgataaattttgaattggggtgagtaccgacaccttcaataatcatatcgtaatgttcaacttttcctgatttaaatgtaatttcatttccattgatagcattaatttcctcatttaaacggtatggaatctcccgcttatctaattcatcaagtataggttgattcatgtcggcatccattaatttatttatcttatcagatcgatgaattaaagtagggtgtaaaccacgttcataaagattttcaagaacttctaatgaaacataacctgcacctacaaccaatactttatcaacttgatttgctttgatgaattgatcgatagcatcagtgtcttctaaatttctaagtgtaaatgtaatatcactttcaaagccaaggctatttgcacttgcaccagggcttaaaatgagtttatcgtaagattcttcaaattgttcgtttgtctttctatttaatacagatacagtttgtctttcatcattgattgcaataacttcatgataagtttttactgtaatttgctttctatcataaaatttttcaggtgtatacgctaaagcatatcttctatcttcaacaacttcgccaatgacataaggcaatgcacaattagcaaagctcatatcacgatctttttcaaaaataataatgtcactttctttatctaaacgtcgaatttggctggcacatgttgcaccgccagcgactgctccgactacgactattttgggcatcgtaacttacctcctattgttttaaaatattataaaatgattagttataaattaacagtaatatctaatatttaaattaaagaaatcattcaaatatcgaccaatgccatcttcattattgttgaatgtaatattgttcgctacatctttaagttcttgcaaaccattttccatagcaacaccgtgacgcgcgtactcaatcatttcaatatcattatcttcatcaccgaatgcaataatattatttcggtcaatatttaaaaattgtctaacttgctcaatgcctcttgctttattaataccaagttttacaatttcaatgacagggaatggtgcgccccagcgtcgatgctcaatatgatcggcataaaaatgagtaagcatatttttgatttcaggtattttactttcttcggcttcaattaaaattgaggtaggggattctttcaagtggacaagtaaattaccagtttgaattcttggattacccattgaaaaaccttcaaataatcttggatcatgattgttaatgaaaacataatctttcacttctgctataatattcgatacttgatattgttgtaatccttgaataatgttttgtgcgatgcctaaatctaaaatttcatggcaagttttgaagtttttatctttagggtgatgtacgtaagcgccattaaaattaacaattggtgtcgttaaatttaattcatgataatacatttgacttgcacgataaggtctgccagtcgcaatcataatttggtgtccacgttgttgtaattcatttaatacttgtttagtatatgatgaaatttctttgttatcgtttaataatgttccgtctaagtctagacatattaaatgtggttgcatatctctctcctcataagttgcttagttcatatagatacatcatagcattttattggcgttttgtcggatatttgatatattatgaataatatgacattaaagaggtgatatggatggaagaggcattgaaagatagtatcttaggtgcattagaaatggtaattgaccctgaattaggaattgatatcgttaatttgggtttagtatacaaagtgaatgttgatgatgaaggcgtatgtacagttgatatgactttaacatcaatgggatgtccaatgggacctcaaattattgatcaagttaaaacagtattagcagagattcctgaaattcaggatactgaagtgaatatcgtatggagtccaccttggacaaaagatatgatgtcacgttacgctaagattgcacttggtgtgagctaacataaacttgcattgcctgtagaatttcttttcgaaattctctgtgtttgggcccgcagtcaatataacattgtagagtataattcattgtgaataagctcccttcaaagtagacattgaaaaatgaaaattttgaagggagccttatttatgttctagtttctgattttattttgaaaatttatatctaacttgtttcaaaaaatatgaattaagacagtgacttgcacttccaagagtgtacaattcattttctagttgaatattttcttgaaaatttttataataaatttaatttatattacagttatattacaatacataatacttcatagtttttaagttgccgagttgcattacaaattggatttcgaagtaagaatcatcattggtaatttttttaatttaacagtattttagtcaatatgattttgatgatgtcgtaattcaataatatacatatgcatttcaatattcttttaaacagcataactaaatttaattaagcatctaagaagaacagttttaaaagggaagaatgcaaaaatgaacaaaacaaagggttttacaaagtataagaaaatgagatatattccagggctcgatggtttgagggcaatcgctgttctaggaattattatttaccacttaaataagcaatggttgacaggtggctttttaggtgtggatacattttttgtgatctctggttatttaattacaagcttattactcaaagagtatgatgacacaggtatcattaaattgaaaagcttttggatacgtcgtttaaaacgtttattaccagcagtcatagttttattaatggttgtagggacagcaaccttattattaaaatcagataatatcattagggttaaacatgatattattgctgcgatattttatgtatcaaactggtggtatatagcaaaagatgttaattattttgagcaattttcatttatgccattaaagcatttatggtctttagcaattgaagaacagttttacatatttttcccagttattttggttacattattgttaacaattaaaaagcgatacaaaataggatttattttttggggagtatcaataatttctttagggttaatgatgtttatctatagtattaatggggatcattcacgagtgtattttggtacagatactagattacagacattgttactgggtgttattttagcttttttatggccaccgtttaaattgaaaaatgatccacctaaagttgtaaaatatgttattgatagcataggtagtttatcatttatagtacttatattattatttttcattattaatgatgagacgaattggatatatgatggtggtttctatttaatatccatattaacgttatttattattgctagtgtcgttcatccatctacatggatagcgaagatattttcaaatccagtgttagtatttatcgggaaaaggtcttatagtttatatttatggcattttgcagtaattagtttcgtacatagttactatgtagacggacagatacctgtatatgtgtactttatagatataagtttaacaattatatttgcagagctatcatatcgctttatagaaactccatttagaaaagaaggtattaaagctttaaattggcgaccttcttatataccacaatttataagaatggcaattgtagtaaccttgttaattccatttatgttgattttagtaggtgcattcaataaatatggtaaagacattattggagaaaaagcgaatagctttgataccacaattgaagataattatttaatgcggatagcaccaattgataacatacacattgatggcttagtaagtgagaagaaaaaggaatcttccgacgtatataataatattaaacctcttttaatcggtgattcagtaatggttgatatcggtgagtcatttaagtcatcagttcctaagtctagaattgatggaaaagtagggcgtcaattgtatcaaaccttacctttagttaaagcgaattattcacaatataaaaaatcatctgatcaagtcgtattagaattaggtacaaatggcgactttactgtcaaacagctcgacgatttacttaatcaatttggaaaagccaagatttatttagttaatacacgtgttccaagaatttatgaggcaaatgtaaatcgattattagctgacgcggcgaaacgaaagtccaatgtcacattaattgattggtataagcgatcacaaggacatagtgaatattttgcaccagacggtgtacatttagagtacaaaggagtcctagctttaaaagatgaaatattaaaagcacttaaaaagaaataacatatgtttaataagtctagttaatgtgtaacgtaacattagctagatttttttattcaaaaaaatatttacaaatattaggaaatttaagtgtaaaagagttgataaatgattatattgggactataatataattaaggtcaaagaaagtcaaagtcaaaagtgcaacttgaccaactctacaaattagaggtgaaattatatggatataaataaaatgacatatgctgttcaaagtgctttacaacaagcagttgaactgagtcagcaacataaattacaaaatatagaaattgaggcaattttaagcgctgccttaaatgaaagtgaaagcttatataaaagtattttagaacgagcaaatattgaggtagatcaattaaacaaagcttatgaagacaaactaaacacgtatgcatctgtagaaggtgacaatatacaatatggtcaatatattagccaacaagcaaaccaattgataactaaggctgaatcatacatgaaagaatatgaagatgaatatatttcaatggagcatattttacgttcggcaatggacattgatcaaacaacaaaacattatataaataataaagtagaagttatcaaagaaattattaaaaaagtaagagggggaaatcacgtgacatcacaaaatccagaagttaattacgaagcattagctaaatatggccgcgacttagtagaagaagttagacaaggtaaaatggatcctgttataggaagagatgaagaaattcgaaatacgattcgtattttaagtcgtaaaactaaaaacaaccctgtgctcattggtgaaccaggtgttggtaaaactgcaattgttgaaggattagcgcaacgtatagttaagaaagatgtgccagaatcattattagataaaactgtttttgagttagatttaagcgcattagtagcgggcgctaaatatcgtggtgaatttgaagagagattaaaagcagtcctaaaagaagttaaagagtctgatggtagaattatattatttattgatgaaatccatatgcttgtaggtgctggtaaaacagatggtgccatggatgcaggcaacatgctaaaaccaatgttagcacgaggagagttacattgtattggtgcaacaactttaaatgaatatcgagaatatattgaaaaagattcggcattagagcgtcgtttccaaaaagtagcagttagtgagcctgatgttgaagatacaatttcaattttacgtggtttaaaagaacgatatgaagtgtatcatggtgtgcgtattcaagatagagccttagttgctgccgctgaattgtctgatcgttacatcactgatcgttttttaccagataaagcgattgatttagttgaccaagcatgtgcaacaattcgtacggaaatgggatcaaatccaactgaattggatcaagttaatagacgtgtcatgcaattagaaattgaagaaagcgcacttaaaaatgaatctgacaatgcgagcaaacagagattacaagaactacaagaagagcttgccaatgaaaaagagaaacaagcagcacttcaatctcgtgtagaatcagaaaaagaaaaaatagcaaatttacaagaaaaacgtgcgcaactagatgaaagtagacaagcgttggaagatgcacaaacaaataacaatttagaaaaagctgctgaactacaatatggaacaattcctcaattggaaaaagaacttagagaattagaggataatttccaagatgagcaaggtgaagatacagatcgaatgattcgtgaagttgtaacagacgaagaaattggcgatattgtcagccaatggacaggcataccagtttcaaaattagttgaaacagaacgtgaaaaattacttcacttaagtgacatcttgcataaacgtgttgtaggtcaagataaagcggttgacctggtttcagatgcagtagttagagcaagagcaggtattaaagatccaaacagacctattggtagtttcttattcctaggtccaactggagtaggtaaaactgaattagctaaatcattagctgcatcattatttgattctgaaaaacatatgattcgtattgatatgagtgaatatatggaaaaacatgcagtatcaagattgataggggcacctccaggatatattggacatgatgaagggggtcaattaactgaagcggttcgtcgtaatccatactcagttattttattagatgaggttgaaaaagcgcatactgacgtctttaatgtattattgcaaattttagatgaaggccgtttaactgattctaaaggacgtagcgttgattttaaaaatactattattattatgacaagtaatattggatctcaagttttattagaaaacgtaaaagagactggtgaaattacagaatcaacagaaaaagctgttatgacaagtttaaatgcatatttcaaaccagaaattttgaatcgtatggatgatatcgtattatttaaaccattatctattgatgacatgagtatgattgtagataaaatcttaacgcaattaaatataagattattagaacaacgaatctcaattgaagtttctgatgatgctaaagcttggctaggtcaagaagcttatgaacctcaatacggtgcaagaccattaaaacgttttgtacaacgccaaattgaaacaccattagcacgtatgatgattaaagagggattcccagaaggtacaacgattaaagttaatttaaattcagacaataacttaacgtttaatgttgaaaaaattcatgaataaaattgaaccaagaatgtgatgattaatcgcattcttggttttttagatttgaaatttattataattgttcattggcaatatactttttaaatgatttaataaacaccaatatttctgggctttcttttttgctgtatatatatgtaaatgaaataggtgcttgtaaaattttcgtgttaataaccgaaatattgtaatcactatttgttgttatataaagaggcaggaatgatataccttgattcatttcgattaatttaattgaagtatgcacatcattgatagatagaaattgtgctttttcataaatatttaaaatattatttttaagtgatgaccaatattctggatggttatcacttattattttgtatttttcaaataaagatgcctcagttagaagatgattattctctttattgggagcaatcaatacaattttaccttcgcatactttttcagaatgaacttctcttagtttaggttgatttctgctaatcccgatgtcatacgtatgattattaatatctttttcaatattttcatttttgacatgaagagaaacatcgataaaaggatgctcgttaaagaaagattttaaaaatttgggcataatgaatgtcgcgatatatgaagacacgacaacatttaatttcgattgaaacatcgtttttttaagttggatatgtttgatgccactttcatattgttcaataaaactttgcgcaattggaagaaatgtatgaccatcttcagtcaagataatttgatttttataagtttcaaatagtttcacattgagatgctgttctaaatttttaatttgcttatgtatagaaggtatagtgagattaatttcttcactagctaatcgatagtttaacgtcttcgctaaaatgacaaatgtatagtaccaatctaaattcatgaacttacctctttcaaaaaagttaataattcattagataatatttaatttttattgcataaaaataatattaatattatatcagaggttatcgagggggtgaagtaatatgattcgaattcaagataatacaataagggatggtatgcaacaaagtaatgttcgaaaaagtctaattataaaaaaagaagtattgaaacaaattaacaagttaaatataaattctgttgaagtaggcatgtgtacaactatcgaggatgaatttaatattcatcaattcagagacattttaagtcctgaaaaagaattagtagtattgactaggcttaatgaaaaagaaataaaaaaaatagtcaaattgaaaattcataatttagtggtaaaaatactattgccaatatctgacttgcatataaaagaaaagcttaatttttcaaataaatattatattcagaaaatcaaagactgcttggatatattaaagaaagataaaaaaggagtagatatttgttttgaagatggaacaaggacttctagagaaaaattgaaagaatacatggaaattatttcaaaatatcaagttagaacagttacatttgcggacactgtaggatgttcgacaccattagaatacggagatatttttaattactttgtaaaaaaatattctaacataattttttctgctcattgtcataacgatctagggttggctactgcaaatacattagctgcaattttaaatggtgcaaagcaaatagaaactacatttttgagaattggtgagagagcgggtaatgctcctattgaggaaataattactattttgacaaaaaaacaaatagaaagtacggaattcactttacccgacgtatataaaactagtattaatatttctaaaattctcgattttcaaatatcagaaaacaaacctataattggtgaaaatatatttaaacatgaatcaggaattcatcaagatggtactaaaaaaaatataaatatgtatcaatatttagttcctagtgatttaggattgaaaaattcacaagttgttcagtttccaataagtaatatttctagtaagaaaatcttgcacaataaatttaaatcaatagttaacactgaagaaattgatgaaaatatttctttctataaacttgtgaacaagttttcacctgaagtagcacctgaagatacagtggatttacttcagataataaaaaggaggagtaaagatggaaattttaaatgattctgtaaaaagttttgaaaaactttatttacaattacaagatggttttccagtgattgttcctactgatactaattataatttatgtagtttacctaacaacgatctttgtatcgataaaatatttgaatataaaaagcgatcgaaagataagccattatcattatttattgataagccagaggattggaaattgtatggagataatcaaaatacggaaatagttgataaactagttgaaatattttggcctggaccattaaatattattttaaaaaataaaacaagctataattatatgctcaataattcagatagtatagctataggatgtgtacaaaataaaacgatgagaagatttatttcatatattaattcacctatagcaattacttcagcaaatatatctggaactgccgatgatattttaataactgaaaatgaagcaattaagcacatgggcgaaaatgtaagatatatgctaagaagtcaaaataaaactaactataaaacatctagtacgattattaaagtgacagataataaaattgaattattaagagaaggagatataaagtttgaagaaataaaagaaagactaggtacaggtattatttatgaataagttaatacttgggatttatttataccgaattttttcacgagcatacttttatttaccgtttttattaatttactttttgattcaaggttattccataatacaattagaaatattaatggcgtcttatggcattgcagcatttttattctctctatacaaagagaagtgttttaaaatttgtaacttaaaagattctaataaattagttgttagtgaaatattcaaaatcatcggtttattgttgttattatatcaaaatcaatatttaattttagtagtggcacaaatattattagggttaagttactcaatgatggcgggtgttgataccgcaataattaaaagaaatataacaaatgagaaatacgtacaaaataagtcaaatagctatatgttcctatcattattaatttcagggattataggtagttatctttatggaataaatattaaatggcctataataatgactggtatattttcaattctaacaattataattattcgatgcacattagttgaaaatagggaattaaatttaataggagaaacaaagggaaagataaagaaatttctaccagaagagaagttttggatattgcattattcttttttaagagcgttaatattaggattttttataggatttattccaattaatatatataatgatttaaaactgaataatttacaatttatttcagtattaacttgttacacagttatgggttttgtatcttcacgttatttaactaaatacttgaattataagtttgtgtcagaaatttgtttagtaatatttttaataatatatacatatcaaagtttcatagcagttactatttctatgatatttttaggtatttcttcagggttaactcgtccacaaactataaataaactttctagcagtagtaacttaagagtgatgcttaattatgcagaaacgttatattttatttttaatatcgcatttttacttatgggtggttacttatatacaataggaactattcaatacttaatattatttatttcgttattaatttttatatatttaataataatattttattttacaaggagagagcaacatgaaaataaaaactgaatttaaagggaacaatataccatatgaatacgcagcaggtgcagatgtgagtgattctattaacgggaatccaattaagtcatttccatttgaagtaattgaattaccggaagggactaaatatcttgcttggtctttaattgactatgatgcaattcctgtatgtggctttgcttggattcattggagtgtagctaatgtaagtgttagtggcaattcaatttctataaaagcagatttatcaagaacaaagggcgactatgtacaaggtaaaaatagctttactagtgggttgttggctgaagatttttcagaaatagaaaatcactatgtaggacctacaccacctgatcaagatcatcaatatgaattaacagtttatgcgttagatcattctttaaatttgaagaatgggttctacttgaatgaatttttaaaagaagtaaatcaacataaaattgatcaaacaagtattaaccttataggaagaaaaatttaatactaaatatctcatcaatataaaattgttcaattaaaagtacaaagaaacaaaggttttaatttatatattaggtacggcgttcgctataatgcaaagaagtaattaaatttaagaaatgtaaacttagttattgtaatgtgaatttatttgaaaaaatagaaagtattaacaattatagcttttacattaattaaaatttatttttaaaaacaagtaaacaatttacatacttataatttttgaaacttttcaatttgtgttatattgattttgtaagatactttaactcacaaaggagagagattatatgaaattaaaatcatttataactgtaactttggcactgggcatgatcgcaacgactggcgctactgtggcaggtaatgaggtatctgcagcagaaaaggacaaactaccggcaactcaaaaagctaaagaaatgcaaaatgttccatatacaattgcagtagatggcattatggctttcaatcaatcttacttaaatttaccaaaagatagccaattatcatatttagatttaggaaataaagttaaagctttgttatatgatgaacgcggtgtaacacctgagaagattcgaaatgcaaaatctgccgtttacacgattacttggaaagatggtagtaaaaaagaagtggatcttaagaaagatagctacacagcaaacttgtttgattcaaattcaattaaacaaattgatattaatgtaaaaactaaataaacacttaaaattatcaaattcaacatgaagcatttaattttacagtgatgattataaaataattgccttgatacaaagattactcgtaaatgacatctttgtattaaggctttttctaaatttaaaagtgatgggttagaggtcattgagctttaaaatattcaaaatacaaaacattaatggccaaaaataaaagccgcctttatctgggcagcttcaataataagaaagacatatttcattttatactaaatagttattgtgatgaatctttcggcggtttaattactgcagcaaaaattgctgtgaaaatcgtgaacaatactgccatgataattggattcactacatttaagctgtctccacctactaggctattaagtacaaagttaaccatttgcattaataataatgcccaaaagaatgttacgaggtgtttcatgtcattctacctccactttaattatatatattttattttaagtgaaagttagaaatttgtatagtaacatctcatatattttgaccatattatacagtttaaataaatgattttatctgaatggctattctaaattaagcgcattaaaaccaatttcatactgaaatttgacgataataaagcattaaaattttattaactagtcaatattcctacctctgacttgagtttaaaaagtaatctatgttaaattaatacctggtattaaaaattttattaagaaggtgttcaactatgaacgtgggtattaaaggttttggtgcatatgcgccagaaaagattattgacaatgcctattttgagcaatttttagatacatctgatgaatggatttctaagatgactggaattaaagaaagacattgggcagatgatgatcaagatacttcagatttagcatatgaagcaagtttaaaagcaatcgctgacgctggtattcagcccgaagatatagatatgataattgttgccacagcaactggagatatgccatttccaactgtcgcaaatatgttgcaagaacgtttagggacgggcaaagttgcctctatggatcaacttgcagcatgttctggatttatgtattcaatgattacagctaaacaatatgttcaatctggagattatcataacattttagttgtcggtgcagataaattatctaaaataacagatttaactgaccgttctactgcagttctatttggagatggtgcaggtgcggttatcatcggtgaagtttcagatggcagaggtattataagttatgaaatgggttctgatggcacaggtggtaaacatttatatttagataaagatactggtaaactgaaaatgaatggtcgagaagtatttaaatttgctgttagaattatgggtgatgcatcaacacgtgtagttgaaaaagcgaatttaacatcagatgatatagatttatttattcctcatcaagctaatattagaattatggaatcagctagagaacgcttaggtatttcaaaagacaaaatgagtgtttctgtaaataaatatggaaatacttcagctgcgtcaatacctttaagtatcgatcaagaattaaaaaatggtaaaatcaaagatgatgatacaattgttcttgtcggattcggtggcggcctaacttggggcgcaatgacaataaaatggggaaaataggaggataacgaatgagtcaaaataaaagagtagttattacaggtatgggagccctttctccaatcggtaatgatgtcaaaacaacatgggagaatgctctaaaaggcgtaaatggtatcgataaaattacacgtatcgatactgaaccttatagcgttcacttagcaggagaacttaaaaactttaatattgaagatcatatcgacaaaaaagaagcgcgtcgtatggatagatttactcaatatgcaattgtagcagctagagaggctgttaaagatgcgcaattagatatcaatgaaaatactgcagatcgaatcggtgtatggattggttctggtatcggtggtatggaaacatttgaaattgcacataaacaattaatggataaaggcccaagacgtgtgagtccatttttcgtaccaatgttaattcctgatatggcaactgggcaagtatcaattgacttaggtgcaaaaggaccaaatggtgcaacagttacagcatgtgcaacaggtacaaattcaatcggagaagcatttaaaattgtgcaacgcggtgatgcagatgcaatgattactggtggtacagaagcaccaattactcatatggcaattgctggtttcagtgcaagtcgagcgctttctacaaatgatgacattgaaacagcatgtcgtccattccaagaaggtagagatggttttgttatgggtgaaggtgctggtattttagtaattgaatctttagaatcagcacaagctcgaggtgccaatatttatgctgagatagttggctatggtactacaggtgatgcttatcatattacagcgccagctccagaaggtgaaggtggttctagagcaatgcaagcagctatggatgatgctggtattgaacctaaagatgtacaatacttaaatgcccatggtacaagtactcctgttggtgacttaaatgaagttaaagctattaaaaatacatttggtgaagcagctaaacacttaaaagttaactcaacaaaatcaatgactggtcacttacttggtgcaacaggtggaattgaagcaatcttctcagcgctttcaattaaagactctaaagtcgcaccgacaattcatgcggtaacaccagatccagaatgtgatttggatattgttccaaatgaagcgcaagaccttgatattacttatgcaatgagtaatagcttaggattcggtggacataacgcagtattagtattcaagaaatttgaagcataactataaaaatcttcagtaacgttgttttagttactgaagattttttcagtttctttatactaagatgagcgacagcacaatcgtcataataaaatataaaatatttattaataataaggggattatccatgtagaaacaaagtaatgctctttttttacctcttgtgggttgaaaaatggatcatcagagatagacttcttctttttcgaagatgacatttgatactttaatcttctaaaaccataacttgtcgcatcaaaaatgccttcttgtacaagtaaaatcaaaaatatgctaataaaaataattaatgaaacataaaacaatatatttaaatatgtaatgatagtatggctattaaaaagccatataataaacgttaatattggcgttattagtgccattccaagccattttttcaacatttgatcactcccacttatagaaaactcttacgcatagtttacattaaaatcagacattgaggaatgattttttaatttcttcagctttattgaaattctaaaatcaatcattcttcattagtttaaagcaaaaaaatattgatatatagtaaatattgtatatataatattagttaagatttcagaaaattttgaagggaatggaaatttagaaatcggaatttgttagaggaggggattagatggggaaatatattttcaaacgatttatttatatgcttatttctttatttattattattacaattacatttttcttaatgaaattaatgccaggttcgccatttaacgatgctaaattaaatgctgaacaaaaagaaattttaaatgaaaaatatggattaaatgatcctgtagctacgcagtatttacattatttaaaaaatgttgttacaggcgattttggtaattcattccagtatcataatcaacctgtgtgggatttgattaaaccgagactactaccttcttttgaaatgggtcttacagcaatgttcatcggtgtgatactgggacttattttaggtgttgcagcagctactaaacaaaattcttgggttgactatacaactacagttatttcagttattgcagtatctgtaccatcttttgtacttgctgtacttttacaatatgtatttgcagttaaattaagatggttcccagtagctggatgggaaggtttttcgaccgcggtattaccgtcacttgcattatctgcagctgttttagcaactgtcgccagatacataagagcagagatgatagaggtattaagttcagactatattttattagcgagagctaaaggtaattcgacaatgcgtgtactttttggacatgcacttagaaatgctttaattccaattattacaattatcgttcccatgttagcaagtattttaacaggcactttaacaattgaaaatatttttggagttcctggattaggggatcaattcgtacgttcaattacaacaaatgatttctcagtaatcatggcaatcacactattatttagcacactgtttatcgtttctatttttattgtagatattttgtacggtgtgatagatccacgaattcgtgttcaaggaggtaaaaaataatggctgaaaataaaaacaatttgtcgattaacgacgatcattctaatgcagctatgacgcatacctctgacgctatcgcatcatctgattttattattagagaattagatttgaatcaggaacctgaaatgcaacgagaaagcaaaaacttttggcaagatgcttgggctcagttaaaacgaaataagttagctgttgtcggtatgataggtttaattatcattgtaatatttgcttttatcggtccagttataaataaacatgattatgctgaacaaaatgtagaacatagaaatcttccggcaaaaatacctgtattagacaaagttccatttttaccttttgatggtaaagatgcagatggcaaggatgcttataaagcagcaaatgctaaagaaaattattggtttggtactgatcagttgggtcgagatttatggacaagaacatggaaaggtgctcaaatttcattgtttatcggtgttgttgcagcgatgttagatatttttattggtgttgtatatggtgcgatttctggattcttcggtggacgtgtcgatacgattatgcaacgtatacttgaagtcatagcatctattccgaatttaattgtcgtaattttatttgtattaatttttgaaccatccatttggacaattatattggctatgtctatcacaggctggttaggcatgagcagagttgtacgtggagaatttttaaaattaaaaaatcaagagtttgtcatggcttcgaaaacattgggggcttcaaaattcaaattgatatttaagcatattttacctaatacattaggtgctatcgtggttacatcaatgtttacagtacctagtgctattttcttcgaagcatttttaagtttcattggtataggtgtacccgcacctcaaacatcgttagggtcattagtaaatgatgggcgcgcaatgttattaatttatccacatgaattatttataccagcaatgattttaagtttattaattctattcttttacttatttagtgatggattacgtgatgcatttgatccgaaaatgcgtaaataaaaagggggcatagcatatgactgaaagaatattagaagtaaatgatttgcatgtttcctttgatattacagcaggggaagtgcaggcagtgagaggcgtagatttttatttgaacaaaggggaaacattggcaattgttggtgaatcaggttcaggtaaatctgtaacaacaaaagcaattacaaaattattccaaggggacacaggaagaattaaaaagggagaaattttatttttaggggaagatttagcaaaaaaacctgaaaatgagttgattaaattacgtggcaaagatatttcaatgatctttcaagatccaatgacatctttaaacccaacgatgcaaattggtaaacaagtcatggaaccattaattaagcacaaaaattatagtaaagcacaagctaaaaagcgcgcattggaaatactaaatcttgtaggtttaccaaatgcagaaaaaagatttaaagcatatcctcatcaattttcaggtggacaaaggcaaagaattgttattgcaaccgcattagcttgtgaacctaaagtgctcattgctgatgaaccaacgactgcattagacgtaacgatgcaggcacaaattttagatttaatgaaagaactacaacaaaaaatcgatacagcaattatttttataacgcatgatttaggggttgttgcgaatattgctgatagagtggcagttatgtatggtggtcaaatggttgaaacaggagatgttaacgaaatattttatgatccaaagcatccatatacatggggattattatcgtcaatgcctgatttatcaacaacaaatgacacaccattactagcgattcctggagcgccacctgatttattacacccacctaaaggtgatgcatttgcgagacgtagtcaatatgcattagatattgattttaaagtagaaccaccgtggtttaaagtttcaccgacacattttgtgaaatcttggttattagacgcacgtgcaccaaaagttgaactacccgagctggtaaaacaacgtatgaaaccgatgcctaataattatgaaaaaccactcaaggtagaaagggtgtcgttcaatgaaaaatgatgaagtgctattatctattaaaaatttaaagcaatattttaacgcaggaaagaaaaacgaagtgagagcgattgaaaatatttcgtttgatatatacaaaggggaaacattaggtttagtaggagaatcggggtgtggtaaatctacaactggtaaatcaattattaaacttaatgatattacaagtggagaaattttgtatgagggtattgatatacaaaagattcgtaaacgtaaagatttgcttaaatttaataaaaagatacagatgatttttcaagacccatatgcgtctttaaatcctaggttaaaagtaatggatatagtagctgaaggtattgatatccatcatttagcaactgataagcgtgaccgaaaaaaacgtgtctatgatttacttgaaactgttggattaagtaaagaacatgccaatcgctatcctcatgaattttcaggtggacaacgccaacgtattggaattgcccgtgcattagccgttgaaccagaattcattatcgcggacgaaccaatatcggcattggatgtttcaatccaagctcaagtagttaatttattattaaaattacaacgtgaaagagggattacgttcctatttatagctcatgatctatcaatggtgaagtatatttcagatcgtattgcagtcatgcattttgggaaaatagttgaaattggaccggcagaagaaatttatcaaaatccattacacgattatactaagtctttattatcagccattccacaacctgatcctgaatcagaacgcagtcgcaaacgatttagttatattgatgatgaagcaaataatcatttaagacaattacatgaaattagaccgaatcactttgtctttagtactgaagaagaagcggcacaactacgagaaaataaattggtgacacaaaattaaggggaagggggaaatgcaatgacgagaaaatttagaacacttattttaattttgattgctacaattgcattaagtggttgtgctaatgacgatggtatttattcagataaaggtcaagtattcagaaaaattttgtcatcagacttaacatcccttgatacatcattaataacggatgaaatatcttctgaagtgactgcgcaaacattcgaaggtttatacacattaggaaaaggtgacaaaccggtgttaggtgttgcgaaagcttttcctgaaaagagtaaagatggtaaaactttaaaggttaaattaagaagcgatgctaaatggagcaatggtgacaaagtgactgcacaagactttgtttatgcttggagaaaaacagttgaccctaaaacaggttctgaatttgcatacattatgggggacattaaaaatgcgagtgatattagtactggtaagaaacctgtagagcaattaggtatcaaagcattaaatgatgaaacattacaaattgaattagaaaagccggttccatatattaatcaattattagcacttaatacctttgcacctcaaaatgaaaaagttgccaaaaaatatggtaaaaattacggtacggcagctgatagagcggtatacaatggtccatttaaagttgatgattggaaacaagaagataaaaccttactatctaaaaatcagtattattgggataaaaagaatgtaaaattagataaagtgaattataaagttattaaagacttacaagccggtgcatcattgtatgatactgaatcagtagatgacgcagttattactgcagatcaagtaaataaatataaagacaacaaaggattaaactttgtgttaacgactgggacattttttgtaaaaatgaatgaaaaacaatatcctgattttaaaaacaaaaatttaagattggctatcgcacaagcaatagataaaaaaggatacgttgattcagtgaaaaacaatggctcaattccttccgatacactaacagccaaaggaattgcgaaagcgcctaatggcaaagattatgcgagtaccatgaattcgcctttaaaatataatcctaaagaagcaagagcgcactgggacaaagctaaaaaagagttaggtaaaaatgaagtgacattttcaatgaacacagaagatacaccagatgcaaaaatatctgctgaatatatcaaatcgcaagttgagaaaaatttaccaggagttactttgaaaattaagcaattaccgtttaaacaaagagtatcactagaactgagtaacaattttgaagcatcacttagtggttggtctgcagattaccctgatcctatggcttatttagaaacaatgaccacaggtagcgcacaaaataatacagactggggtaataaagaatatgatcaattacttaaagtagcaagaaccaaattggcacttcaaccgaacgaacgatatgaaaacttgaaaaaagcagaagaaatgttcctaggagatgcaccggtagcaccaatttatcaaaaaggtgttgcacatttaacaaatcctcaagtaaaaggattaatttaccataaatttggtccaaataactcacttaaacatgtatatattgataaatcgatagataaagaaacaggtaagaagaaaaaataatatgctttgtaaattaggctggagacatatctccagtctttttgtgttggataaaaactttgggaataaaaatttaaaataagtcgttttttaaattactgaaattgattaaatgcataaataactgaatattctaaaaataaacttgtaataattttttctatgagtaaactaaaaagaaaaaattagattgaaagtaggaggcatatgtatggggaagctaattaaatatatttcaatacttcttattgtcgttttagtgttgagtgcttgcggaaaaagcagtaataaagatgaaggagtaaaagatgctactaaaacggaaacctcaaaacataaaggtggtaccttaaatgtagcattaacagcaccgccaagtggtgtttattcttcgttattaaatagtacacatgcagattctgtagttgagggatattttaacgaaagcttattagcaactgataaaaaaatacgtcctaaggcatatattgcttcatggaaggacatcgagccggctaagaaaatagaatttaaaattaaaaaaggtattaaatggcatgatggtaatgaattgaaaattgatgattggatttattcaattgaagtcttagctaacaaggactacgaaggtgcttattatccaagtgtagaaaatatccaaggtgcgaaagattatcatgaaggaaaaactgatcatattagcggattgaagaaaatagatgactacactatgcaggttacatttgataaaaaacaagaaaattacttaacaggatttattactggacctttattaagtaaaaaatatttatcagatgtaccaattaaagatttagcgaaatcagataaaatccgaaaatatcctattggtattggaccgtataaagttaagaaaatcgttccaggtgaggctgttcaactcgttaaatttgatgattattggcaaggtaagcctgcactagacaaaatcaatttaaaagttattgatcaagcgcaaattattaaggcaatggaaaaaggcgatattgatgttgcgaatgatgctaccggtgcaatggcaaaagatgctaagtcatctaatgctggtctcaaggtattatctgcgccaagcttagactacggtttaataggattcgtatctcatgattacgataaaaaagctaataaaactggtaaagtgagaccaaaatatgaagacaaagaattacgtaaagcaatgctttatgcaattgatagagaaaaatggatcaaagcgtttttcaatggttacgctagtgaaatcaatagttttgtaccatctatgcattggatagcagccaatcctaaggacctaaatgattacaaatatgatcctgaaaaagctaaaaaaatcttagataagttaggttataaagatagagatggtgacggatttagagaagatcctaaaggtaataaatttgagattaactttaaacattattcaggttctaatcctacttttgaaccaagaactgctgcgataaaagatttctgggaaaaagttggcttgaaaacaaatgtgaagttagtagaattcggtaaatataatgaagacttagcaaatgcatctaaagatatggaagtgtacttcagatcatgggcaggaggtacagatccagatccatcagatttataccacactgatagacctcaaaatgaaatgagaacagttttaccaaaatcagatcaatatttagatgatgcattagacttcgaaaaagtaggcattgatgaaaagaaacgtaaagatatttatgttaaatggcaaaaatatatgaatgatgagttacctggattaccaatgttccaaggtaaatcgataactattgttaacgataaagtacgaaacttagacattgaaattggaactgatcaaagtttatataatttaactaaagaagcttagtaatgtaacctcgacgattttgtcgaggtttacttatatggggggatgttatgaataatgtattgttagaggttaaagatttagaaacatcattaaaaataaataatgaatggttagcaactgttgaaaatatttcttttgaattatctaaaggagaagttttgggtatagtaggggaatctggttgcggtaagtccatattaagtaagtcaattattaaattattaccagaaaagatatctaaactaagtaatggagaagttatatttgatggtaaacgaatcgatacgctcaatgagaagcaattgccagatattcgaggaaatgatattgctatgatttttcaagaacctatgactgctttaaatcctgtatttaccataaaaaatcaacttgtggaatctataaaatcacataaaaaaatttctaaaaaagaagcaaataaattagcaaaagatttactaaaaaaagttggaattgctagacaagatgaaatattaaatagctatcctcatcaattatctggtggtatgagacaaagagtaatgattgcaatggccatttcatgttctcctaaattattaattgctgatgaacctacaacagcattggatgtcacgattcaagcgcaaatattagacttattaaaagaattgcaaaaggaaacgcaaatggcaattatgatgattacacatgatttgagtgtagttgctgagttttgcgataaagtcttagttatgtatgcaggtcaaattgtagaatttggaggcataaaagaaatactacacaatccgaaacatccttatacccaaaaattattatcaacaattccaaaacttaaagaagagcagaaacgacttgaaacgatagaaggaattgtgccatcaatccaagcatttcacgttaataagtgcagatttgcaaatagatgtaacaaaaaactggatatttgtaataatcaatctcctaaaatgcatgtttgtgaagatgtcattgtacgttgtcatttgtacaaaaatgaatataaggagatataagaatggaaaatattttagaagtcaaccaaataaaaaaatactacaaaattaaaactggattattacaaaaaactcagtacgttaaagctgttgatgacgtatcgttttcaataaaaaaaggacaaacttttggattagtaggagaatcgggttgtggtaagtcaacgttaggtaaagtgattatcaggcttgaagatgcaacttcaggctcaataattgttaatggtgaagatataacaagattacaaggtaaaaaactcagaaaatcacgacaacaatatcagatgatatttcaagatccgtatgcatcattgaatccgatgcaaatggttggagatatcatttcagaacctattttaaattataaaaaattgccaaaagaagaaataaaaaaagaagtactatatttattaaaatgtgttggcctaagtgaagatgcatattataaatatgcacatgaattttcaggtggacagagacaaagagtgggaattgcaagagcattggctttgcgtccgagtttaattgttgctgatgagcctgtaagtgcattagatgtatctgttcaatctcaagtactgaatttattaaaagatttacaagaacaatttaacttaagctatttatttatcgcacatgatttaagtgtagtaaaacatataagtgatgtcattggagttatgtatttaggtcatatagttgaaatcgcatctgataaagaaatttatgaaaatcccaaacatccatatacaaaagcgttgatttcatcaataccacaaattgataaacataataacaatagaattatattaaaaggagaattaccttcgccaagtaatccgccgcaaggttgtccttttcatacaagatgtccaattgctcaagatatgtgcaaaaaaagtatgccagaattaaaggacattggtaatgaacatcaagttgcttgtttctacgtagataaagtaggtgatttaaatgattaaattaatacttaaaagattagggttaatgatcccgttactaattttaatctcaatagttgtattttcattagcaatcatacaaccaggagatccattttcagatctacaaaacggtaaaataaaacaagaagcaataaatgcacaaagggaaaaattaggtctcaacgactcaataccacatcaatacattagatgggtcaatcatgttatacacggtgatttaggtgagtcaatcaaatataaaaggccggtaattgatgttattgaggaaagaattccaaatacaatattactcggtgctatgtcattaattattacttatattatctcatttgctttaggaataacgtcaggtagatattcttacagtttgacggattatactgtgcaaatatttaattatttgatgttagccattccatcttttattgcgggagtatttgcaatttttattttttcttttgaattacaatggttcccgtttcaaggttctgttgatattaaccttaaagaaggtacttttgaatattatatgagtaaaatatatcacacatttttacctgcattcactttaggtttattatctactgctggttatattcaatatttacgtaatgatattattgaaaattctaaaaaagattatgtattgacggcaaggtcaaaaggattatctatgaataaaatttataataaacatatattgagaaattctctaatacctattattacatttttaggtgctgatattgtaagtattttaggtggagccgtgattacggagactatcttttcatataacggtatcggtaaattatttttagaatcggtaataggccaagactatccattaatgatggcattaacgttatttttctcatttttaggtttactgggtaatttgatttctgatattacttatggatttatagatccaagaattagaagtaactaggggggattagaatgcaaaataagtcaaaatcgccttttaaaattgcattttctaaatttattcataataaaattgcaatgttatcggttatttttttattaatcataactattgtatcaattatagcgccattaatagctccttttccagtgaaccaacaagatttattaaatataaaaggtgaaatgacagcacaaaacattcttggtacagactctggtggtagggataactttagtcgtttgttatatgcaggtcgtatttcattatccattggaattacatctacaataggaatgcttttgattggaattacagttggagtgatttctggttattttggaggtattgttgatacattattaatgagaataaccgaatttgttatgttatttccatttttaatatttgcaattgtattaaatgctgcacttggagataaaattaaaaatccttatggatctgccataattcttgttctagttattatcgtattaagttggggaggtattgcaagacttgttcgtggtaaagtacttcaagaaaaagaaaatgaatactttttggcagcaaaatcaattggtacacccacatataaaattattttgaaacatcttttgccgaatatattaagtgtagttatcgtacaagcaacattgttatttgccggtatgattgtagtggaatcaggattgagctttttaggattcggaattagtaaagcaataccatcttggggtaatatgttgagtgatgctcaagaaggggatgttataagtggtaaaccgtggatatggatgccacctgctataatgattacattaactatattaagtataaactttgtaggggaagggattaaagatgcttttaatcctagaggtagacgttaaataataaaagaggcactagttaattctagtacctctttattttatctcttacgtcctaaacccatcgctttttccatttttttgacagttttaaatgaaactttgtgtgctttatctctaccttgatctaaaatatcatcaagtttatctgagttatagaaactttcgtatttttcttggaattctactaaaaatgctttaactatttcagcaaggtcacctttaaatttaccataaccttcgccctcatattttgcctcaatatctttaattggcatgtctgttaatccagcgtatattgaaattaaatttgttatacctggcttgttgtcacgatcaaatttaataataccatctgaatcagttactgcgcttttaatttttttagctgcaacattcggctcgtctaataatgaaatgaagtttttagcattatcatcactcttactcatttttcttgttgggtcttgtaaactcatgacacgtccaccaactttaggcatacgaatttcaggtttcacaagcacatcattatagcgactattaaatctatctacaaggttacgagtcaattcgatatgctgcttttggtcatctccaactggaacgatattagtattgtaaagaacaatatcagctgccattaaaggtggatatgttaatagaccagcaggtataccttcaactgctttctgagctttatctttgtattgcgtcatacgctctaattctccaacagaagcaatcgtagttaacatccatcctgcttgtacgtgtgcagggacttcagattgtatgaacaatgttgctttgtctggatctataccagaagctaaataaatcgctgctaattgtctggtctgtttacgtaattttaaacgatcttgtggcattgtaattgcatgttgatctacgatacagaaataacaatcatagtcattttgcacatcaacaaattgttttagtgcgccaatataatttccaatagtaggaattccactaggttggatgcctgaaaataatgtctccatttaaatgcctactttcttagtaatattttaataattatcattataacagtatttcttaaaaatgtaagatgtgttagaatatacgtataacttactactaacaaagggattaataatcttttttataagtgtagaaacttatctgaaaaattaggtttttctcatttaattttaatgttagatagttataataaatagtaacgattaagaattttagaaaaaaatgttttttcttgatctataactaaattttaagcaatgaattttattcattcaaataggagagtgagatgtatggtaacattatttacttcaccaagttgcacatcttgccgtaaagcgaaagcatggttacaagaacatgacattccgtatacggagcgtaatattttttctgaacatttaacaattgatgaaattaagcaaatattaaaaatgactgaagacggtactgatgaaatcatttctacacgttctaaaacataccaaaaattaaatgttgatattgattcactaccattacaagacttatattcaatcattcaagataatcctggcttattacgtcgtccaattattttagataataaacgactacaagttggttataatgaggacgagattcgacgtttcttacctagaaaagttcgtacgttccaattacaagaagcacaacgtatggttgactaataaccatttaactatgtgtcatactttactaaaagatatgtcaagcaacactatttctatagtgttgcttttttggttttaattttacaataattgcttagtatcttttaaatcaaatgtgcaattgttaatatagctctatattagagtgttttggatgaaacatttgctatgataaggtaaaattaaattaagaaagtgctttaatgctttaactgtataaatcatttaaatagttttgctacaacgaatatgttattataagttaccaaaatattttagagaaagaaatcaaacaaataaattgtattttgtttgatgctttaatacaatgtggatactattcatcgactgtaaggagtgagatgatatgagaatagaacgagtagatgatacaactgtaaaattgtttataacatatagcgatatcgaggcccgtggatttagtcgtgaagatttatggacaaatcgcaaacgtggcgaagaattcttttggtcaatgatggatgaaattaacgaagaagaagattttgttgtagaaggtccattatggattcaagtacatgcctttgaaaaaggtgtcgaagtcacaatttctaaatctaaaaatgaagatatgatgaatatgtctgatgatgatgcaactgatcaatttgatgaacaagttcaagaattgttagctcaaacattagaaggtgaagatcaattagaagaattattcgagcaacgaacaaaagaaaaagaagctcaaggttctaaacgtcaaaagtcttcagcacgtaaaaatacaagaacaatcattgtgaaatttaacgatttagaagatgttattaattatgcatatcatagcaatccaataactacagagtttgaagatttgttatatatggttgatggtacttattattatgctgtatattttgatagtcatgttgatcaagaagtcattaatgatagttacagtcaattgcttgaatttgcttatccaacagacagaacagaagtttatttaaatgactatgctaaaataattatgagtcataacgtaacagctcaagttcgacgttattttccagagacaactgaataacgatattaattaagcaacgcactatgaaaggagactctttggagtctctttttttattgatttcaaaagctgaaaaagtaatagtagttaaacttacgtgtaatattttgaggtgaagatatgttagtagctttaaatgaagaaaaggaacgcgtattagcaactactgcattgagaaagacacaatatttttgtccggtgtgtggcaagcaagttattttaaagcgtgggctcaaagtaattagtcattttgcacataaacatttagcggaacaaaaatgttttaataatgaaacgattaaacattataaaagtaaattgattttagcacagatgatacagcaacaaggatgtaaagtagagatagagccattttaaaagaaataaaacaaattccggatattttgattaataataaatatgttattgagctacagtattcgccaattccttataaacagattcttcaacgaacggaaggtttaaagaaaatgggatataaagtaagttggttattaaatgatgttgattattgtcataataaagtgaagttcaatcattttcaaagtatgtttattaatccattcactcgaaaacttcatacgttcaatttagagaaaaaacaaataatgatgtttcaacaaatacaatatttaggcgggcacaaatatgtcgctgaaaaaagaaatgccaaaattagtgagttgtttaatgaggcgccttgtgattatcatgctgtttataaattatcaaagttcgcaattaatcaatatatcaaatattgtcgctggcaaaattctgttttagaacccactttaagtgcaatgtatcaattacagttaactgatcaagaagtagtgcacaattatggttatatttttccagagcaaatttatattaaaaatcatcctattgagtggcaattacaagttgatttatggttaaagaatggaaaaagcaaattagtaaatgacaatcttaattattttaaactgaaaaaatttattgttgctctagaaagtaaaacagcaattatagaaaaacttattaacaattatttaaatatttgttcagataaaggtaatgacgtgcaaattttgttctaaaatgagaaaattatatcaattatattttattaggaggtttactacatatgagtcaacaattatcgagagaagaacaggaacgtaaatatcctgaatatacatgggacttaacaacaattttcaaagatgatgaagcttttgaggctgcatttaaagaagttgaaaatgagttaggcaaagaagaacaatttaaaggacacattggtgatagtgctgagacattatacaatgcgttagaattagaagatacattaggtactaaattagaaaaagtatatgtatacgcgcacctaaaacaagaccaagatacaacgaacgacaagtatactggtatggagtcaagagcacatcaattaattattaaatttagctcggcatggagtttcttagtgccagagattttacaaattgatgaagataaaattcaatcatttgtaaattcatatgataaattacaaaaattcgcatttgatttgaagttgattaatgaaaaacgtcctcatattttagatgctgaaactgaaaagttattaacagaagcgcaggacgcgttatcaacgccatcaaatgtatacggtatgtttagcaacgctgatttagtatttgaagatgcgatagataaagatggaaatgcacacccgttaacacaaggtacatttattaagtatttagaaacagatgatcgcaaactaagagaaagtgcttttagaaatgtatataaagcatatggtgctcataataatacgcttggcgctacgctagcaggtgaagtgaagaaaaatgtatttaatgctcgtacacacaattacaaaactgcaagagaaaaagcattgagtaataatcatattccagaaaatgtatatgacaatctagtaaaaactgtacataaatatttaccattgctacatagatatactgaattgcgcaaagaattgctaggtttagatgacttgaaaatgtatgatttatatacaccattaattaaagatattaagtttgaaatgccttatgaagaagctaaagagtggatgttaaaagcattagaaccaatgggtgaagaatatttaaatgtagttaaagaaggcttaaacaatcgttgggtcgatgtctatgagaataaaggtaaacgttcaggtggctattcatcaggtgcacatttaactaatccatttattctacttaactggtctaatactatttcagacttatacacattagttcatgaatttgggcattcagcacatagttacttcagtagaaaattccaaccgtcaaattctagtgactacactatttttgtcgctgaagttgcatcaacttgtaacgaagcacttttaagtgattatatggataaacatcttgatgatgaaaaacgcttattattattaaaccaagaattagaacgtttcagagctacattattccgacaaacaatgttcgcagaatttgagcataaaattcatgcaattgaagaagcaggtgaaccattaacgccaactagaatgaatgaagaatatgccaaattaaataaattatacttcggtgattctgtagaaactgatgaagatattagtaaggaatggtcacgtattccacacttctatatgaattattatgtatatcaatacgcaactggttacagtgcagctcaaagcttaagtcatcaaattttaacagaaggtaagccagcagtagatagatatattaatgaattcttgaaaaaaggtagctcaaattatccaattgagatattaaaaaatgctggtgtagatatgacaacacctgaaccaattgaacaagcttgtgaagtttttgaacaaaaattgaacgcttttgaaaaattaatgaaagcttagtactattgtattcgcttacattatgaacagattgtgacaatttaaattaagtactattaaaaggttgaaatggtagagatagcatgttatattatgaacatgaaattaatcacataacaaacatacccctttgtttgaagtgaaaaatttctcccatcccctttgtttagcgtcgtgtattcagacacgacgtttttttatgttcttttttaataagagggaagtgaagttgtataaaaatgtattaaatatgcactttttatacattaacgattcatatatgtctattatgtaccaaatttataatttgtataattttcgaactggttaaattcgaaaaatatcactaatatatttagatcgatgtgtaacattacgttctaataatttaatgttgcaaaattaagagtcagtaaaaagacctcgttacatttatggtgtacgaggtctttaatttatttattttgatttgattttaggcattttagatttccagaaatcgccatctggatatttaagtttttcaattttttgttgaatggctaacttctttaactctttgtttaaaagtttttctggccattcataaatagtaagtaattcttccatcgttacaagttgttgttgctgtatataagtttctaatttaggaggaagattcttttcgataggtttacccatcaattcattaattatataagtatagatgtgatatgggtataatccttcgacttttaaaccttcttcatgaacatcttcactaaagaaaacgagagaaggggcttgttcgatttccatttctcttgcaatatgcaaatcaattttcaagctttcggttagtttacttttttgtaagtcgtctttaaatacttctaaatcaatacctgcattttgaatacagtcacaaatcattgattctgtaataatatctcttttaggtatgatttcattttgcattaaatgtataaatcgttcggcacgtacacgaccttgtaactcagctgctttataagctagggcgatgttatcaaagttggatgtactttgagcttggcatttcgttaatacttttaacgaaggatttaatatatgtctgatacgtatatattgattatattcaattcttaatttggataagattgctgataatttgaagcaatcggagctaaatggatcgaaaaatgaataaatttcgattttacttacaggtgatagattgatatcttcacgactcttattttccattattcgtaattctccagccatgtttattcacctacaattaattttaggaattcaccatatgattagcagttaatcttaagcgctcaaataaataatctccaacaccttgtggaaacgcagcgcgattaattgctgtctgcatattttctaaccatgcatctctttcaaattcagtgattgtaaaatctatatgtctttttcttagcataggatgtccgtgttcttcggtataaatgtttggaccgcccaaaaactgtgttaaaaattgtttttgtttacgacttgtttctgcaaaatctcctggaaacaggtgattaagtcgttcatctttttctacaagggtgtaaaaataatgaatcatatcgtataacgcttctttaccaatgatgtcatatggtgttgttgtcatttaatcacccattttcaaaaatttactgttacgaacttaagttaatatataactaatataacatgattttaaacatttgaaagaaatatgcatatttgccaatttaatttatattgtttgaaagtgtttcttttttcttgaaaaaacgttgaactttatttaaaggttgatgatgttcgaggtttagttcgtttaataaagattggaacttttgtaaaccttgattatagtctttaacttcgaactctaactcataatccgtagtatcgaaatactcacttttatctaaaaccagtaaatcacctttatatttagtttcttggcgatatgtcgttaatgcaccaagtattgataaagttgtatcttttacaccaaactgttcaactataatttgacgaatgtcatctggaagattgtcgtttgaaataatcaagttcatctctggtttaatgtcgacgatatagttgtattctaatagaccaacctttgctggtgtctttaaagtcatttcatattgattgtctttaactcttatgcgtagtgcagagcgatgttcctttaatttgaaatcgggtgtatcaatatagtaattgacttgcttaaaaagcacactgtctttaaaatatttctcttgcaatttattatagattgatgcagttatcatttgtttaaattctatttcatgatttgttgccatgatatgtatacacctcgtatcaaattcaatttatcttaactatattatgaatgacaaagttgaattttaaaagtaatttcctttatctattatcaatgttaatttgaccattaaaaatagtgttcgtaagtgttttgtattattgaattgtgttaaaatgttatggaataagaggaggattaagcatgcgtttatatattaatgaaattaaaattaaagatgacatactttattgttatacagaagattctattaaaggattatctgaagtaggacaaatgctcgttgatagtgataattatgcctttgcgtatacattagatgatggtaaagcgtatgcttatctcattttcgtacaagaaacatggacgatgttgcatgaaaacatgactaaaaaaattattatcaatgatgaactagaattgactgaattccaccaagaacttacttatattttagacaacataaaagggaataataattatggtaaggaatttgttgcaaccgttgaagaaacattcgacattgaataaagcggggtgaagcactatgaatcaatgggatcagttcttaacaccttataagcaagcggttgatgagttgaaagtgaaacttaaaggcatgcgcaaacaatatgaagttggtgaacaagcgtcgccaatagaatttgttactggtcgtgttaaaccaatcgctagtattatagataaggcaaacaaacgacaaataccatttgataggttaagagaagaaatgtacgatatcgctggtttaagaatgatgtgccaatttgttgaagatattgatgttgtcgtcaatattttaagacaaagaaaagattttaaagtaattgaagaacgagattatattcgtaacactaaagaaagtggttaccgctcgtatcatgtcattattgaatatccaattgaaacattacaaggccaaaaatttatattggctgagattcagattcgtacattagcaatgaatttctgggcaacgattgaacatactttacgatataaatatgatggtgcttatccggatgaaattcaacatcgtttggaaagagcggcagaagcagcgtatttacttgatgaagagatgtctgaaattaaagatgaaattcaggaagctcaaaaatattacacgcaaaaacgttctaaaaaacatgaaaatgattaacgaggtgttataaatcatgcgttatacaattttaactaaaggtgactccaagtctaatgccttaaagcataaaatgatgaactatatgaaagattttcgcatgattgaggatagtgaaaatcctgaaattgttatttcagttggtggtgacggtacattactacaagcattccatcagtatagccacatgttatcaaaagtggcatttgttggagttcatacaggtcatttaggattttatgcggattggttacctcatgaagttgaaaaattaatcatcgaaattaataattcagagtttcaggtcattgaatatccattgcttgaaattattatgagatacaacgacaacggctatgaaacaaggtatttagcattaaatgaagcaacgatgaaaactgaaaatggctcaacacttgttgtggatgttaacttaagagggaaacactttgagcgatttagaggcgatggattatgtgtatcaacaccttcgggttcaacggcttataacaaagcgctaggtggcgcactgatacatccttcacttgaagcaatgcaaattacagaaattgcctcgataaataatcgtgtgtttagaacggtaggatcaccacttgtattaccaaagcatcatacatgtttaatatcaccagttaatcatgataccattagaatgacgatagatcatgttagtatcaaacataaaaatgttaattcaatacaataccgtgtagcaaatgaaaaagtgaggtttgcacgttttagaccattcccattctggaaacgtgtgcacgattctttcatatcaagtgatgaagaacgatgaaatttaagtatcatatatcacaacaagaaactgttaaaacttttttagcacgacatgatttttctaagaagacagtgagcgccattaaaaataatggcgctttaattgttaatgatgaaccagtcacagtgcgtaagcaattaatgacaaatgatatattagaaattcatttaccgcgagaaataccgagtgttaatttaataccttatgctcgtaagctagaagtattgtatgaagatgcttttatcatcatagttactaaaccaaacaatcaaaattgtacgccttcgagagaacatcctcatgaaagtttaatcgaacaagtactatatcattgtcaggaacatggtgaaaatattaacccacatattgttacgcgtctagatcgtaatacaactggtattgtgatattcgctaaatatggacatatccatcatttattttctaaagtaaacttgaaaaaaatatatacttgccttgtatatggtaaaacccatacatctggtattattgaagctaatattagacggtcaaaggataggattataactagagaagttgcctcggatggtaaatacgctaaaacatcttatgaagtaataaatcagaatgataaatacagtttatgcaaagttcatttgcatacgggacgtacacatcaaattcgtgtacattttcaacatattgggcatccaattgtgggagattctttgtatgatggttttcatgacaaaattcatggtcaagtactgcaatgtacgcaaatatattttgttcatccaatcaataagaacaatatttatattacaattgattataagcaattacttaaattattcaatcaactctaattcacacagggggtgtaagtatgtcaatgaacacagatgaaaaagagcgtgttcaagaggaattatacgaccaaactttattagatcaatatttagaaaatgatgatattgatcaatttagagatgaatttctagcattacacacatatgaacaaagtgagtattttgaagatactaccgatgaaaatagacaaaagatttttcaatatttatcacctgaagaagttgcaaatttctttgatcaattagatattgatgacgatgaatatgagttgctatttgataagatgaatgcgacatacgcaagtcacatattagaagaaatgtcatacgacaatgcagtagatattttaaatgagttgactaaaccaaaagttgctagtcttttaacattgatgaataaagatgacgcgaatgaaatcaaagcattacttcactatgatgaggatacggccggcggtattatgacgacggagtatttatcacttaaagcgcatacgcctgttaaagaagcattattattggtcaaagcgcaagcaccagacgcagaaacaatatatgttatatttgtcgttgatgatgatggtaaattagtaggtgttttatcgctaagagatttaattgtagctgaaaatgatgcttatattgaagatattatgaatgaacgtgtcattagtgtgaatgtagcagacgaccaagaagatgttgctcaagttatgagagactatgatttcatggctgtacctgttatagattaccaagaacatttgcttggtatcatcacgattgatgatattttagacgttatggatgaagaggctagtgaagactactctcgtttagccggggtatcagatatcgattcgactaatgattcaatcattaaaacagcattaaaacgtttaccatggttgattattttaacatttttaggaatgattactgcgacaattttagggagattcgaaaaaacattagaaaatgtagcgctactcgcagcgtttattcctattattagtggtatgtcaggaaattcaggtacacaatctttagccgtttcagttcgtaacattacgacaggggaaattaatgagcaaagtaaatttagaattgcattaagagaagcaggaagtggtgtattatcgggtgttgtatgttcaacaatattatttacaattattgttgcaatatatcatcagccacttttagcattaatcgttgcaggaagtttaacttgtgcgatgacggtggggacgtttgtaggttcgatgattccattattgatgaataaattaaatatcgatccagcagtggctagtggaccatttattacaacaattaatgatattattagtatgttgatttattttggtttagctacatcatttatggcttacttaatttaaggaggagttatggagtttttatctttagttattgttgttttagcagcgtttttaactccaataattgtcaatcgattaaatattaatttcttgccagttgttgttgcagaaattttgatggggattgtgattggaaattcatttctaaatatagtagaaagggattcaattctaaatattttatcaacgttaggctttatctttttaatgtttttaagtggtttagaaattgattttaaagcttttaaaaaagataaacgcgcacgtcaaggacaaaatgatgatgaatcctcaattccagggcatcttaatctagcgttaactgtatttgcatttattatgattatttcgattcttttagcgtatgtatttaaatggcttggattagtggatgatgtgttattaatggtcattatcatttcaactatttccttaggcgtagttgttccaactttaaaagaaatgaatattatgagaacaactatagggcaatttatcctattagtagcagtacttgcggacttagtaactatgattttattaacggtctatggcgcaatcaatggtcaaggcggcagtacaatatggttaataggtatattagttgttttcacagcaatttcatatattttaggtgttcaatttaaaagaatgtcatttttacaaaaattgatggatggtacgacgcaaatcggtattcgtgcggtatttgcattaataatattattagtagccctagcagagggagttggcgcagaaaatatattaggtgcattcttagcaggtgtcgttgtttcattattaaatccagatgaagaaatggttgaaaagttagactcatttggttatgggttctttattcctattttctttataatggttggtgtagatttaaacataccttcattaattaaagaaccgaaattactaattatcataccgattttaatcgttgcatttatcatttcaaaattaattccagtcatgtttattcgacgttggtttgatatgaaaacaacgattgcatcagcatttttattaacatcaacattatcgctcgtgatagctgcagccaaaatttcagaaagattaaatgctatttcagctgaaacgtcaggtatattaattttaagcgcagtcattacatgtgtattcgttccgattattttcaaaaaactgtttccagttccagatgagtttaaccgtaaaattgaagttagtttaattggtaaaaatcaattaacgattcctatagcgcaaaatttaacatctcagttatatgacgtgacattatattatcgcaaagacttgagtgatcgtcgtcaattgtcagatgatatcacgatgatagaaattgctgattatgaacaagatgttttagaacgactaggtctgtttgaccgagacatagttgtttgtgctacgaatgacgatgatattaaccgaaaagttgctaaattagccaaagcacatcaagttgagcgtgtcatttgcagacttgaaagcacaacggacgatacagagttagttgattcaggtattgaaattttcagtagctacttaagtaataaaatcttattaaaaggtttaattgaaacacctaacatgttgaatttattaagtaatgttgaaacgtcactatatgaaattcaaatgttaaattataaatatgaaaatattcaattacgtaatttcccattcggaggagacatcatcttcgtgcgtattatccgtaataatgagtcgattgttccgcatggagatacacaattgcgatatggagatcgcttaattgttaccggtgctaaagaatacgttgatgaattgaagcaagagttagaattttatttttaacaataatgatattaaaatgcagacgtattttagtacgacgtaaaattaatgattttaaaatgctagtatgtatatgattttgataaataaatgctttttacgtaaatcaagtttgatacagaaaggactaaatcaaacatttatcgttgtaatacgtttaaataactttattaaaaagtcataatagtgttaaaatgtattgacgaataaaaagttagttaaaactgggattagatattctatccgttaaattaattattataaggagttatcttacatgttaaatcttgaaaacaaaacatatgtcatcatgggaatcgctaataagcgtagtattgcttttggtgtcgctaaagttttagatcaattaggtgctaaattagtatttacttaccgtaaagaacgtagccgtaaagagcttgaaaaattattagaacaattaaatcaaccagaagcgcacttatatcaaattgatgttcaaagcgatgaagaggttattaatggttttgagcaaattggtaaagatgttggcaatattgatggtgtatatcattcaatcgcatttgctaatatggaagacttacgcggacgcttttctgaaacttcacgtgaaggcttcttgttagctcaagacattagttcttactcattaacaattgtggctcatgaagctaaaaaattaatgccagaaggtggtagcattgttgcaacaacatatttaggtggcgaattcgcagttcaaaactataatgtgatgggtgttgctaaagcgagcttagaagcaaatgttaaatatttagcattagacttaggtccagataatattcgcgttaatgcaatttcagctggtccaatccgtacattaagtgcaaaaggtgtgggtggtttcaatacaattcttaaagaaatcgaagagcgtgcacctttaaaacgtaatgttgatcaagtagaagtaggtaaaactgcggcttacttattaagtgatttatcaagtggcgttacaggtgaaaatattcatgtagatagcggattccacgcaattaaataatatcattcaacagctttgttcacgttattatatatgtgagcaaagcttttttgcttttataataatcggactgatggaaaattatttgatatttcatttgactgattttttatgcacaaaaaaatcgcctcaaaagctgtagtttcaacttttgatgcgatagtatcttatattcttaaaagacatccacagaattagtccttaacattactgtttgctttatcaataatgcgttggcggtatttgaaaatattactaacaaccgttttaagtacagcatataatggcactgcaatcagaactaatgtaaagccacctaaatctcctgctgctaaaataacaacgataattgttaaaggatggatacttaaagatttacccattacatttggtgtaatgatattaccttcaagttgatgtgcaattaatgtaatgatacaaacccatataaatgtagtaggactatctataataccgagtattgctgcaggtgcaaatgataaccatgaacctaagaaaggaattaagtttgcgacaccagcaaatagtactaataaaggaatatatggtaagtcaataattgaataaccgatatataagaatatacctaaaataacactgacagttacttgaccttgaatgtaagattttaatgtaaagtttaaatcagttaataaatctacgaaaaatactttacgttcacctttgaaaaatttagcaacagctgggataaatttttcatggtcttttaacatataaattaagaagaatggaaccataatcaataagaagatggttgaaattaatgatgtaatgtactgtaatgaattagataaaatattagtaacgccatcacccattgatttaaccatatttgtaattctacttgttacatcttcaggtaatttatccatttgagctagtgcgaatttaataatttgctctgcttctttttgtagggcaggtgtctgactaattaaattgttgatatttgaaatgatgattggtgcaacaaacgcaacaattaagccgataatagcaaacaaagctaacatgattgttgttatactagcccatcttggaaaaccgactttttcaagtaagttttgaaaaggtagacagatataaaataaaaaaccactaattaaaaatggaagaaatacagaaccgatgattgtagctattggagtaaatacttcgtgcacttccataaatagtttgatgagaatgaacagcataatcagagcgatgccagttcggaaccaaaccttgtttaacataaacgatgttcctcctatttttctaaacttagttattatttagtatatcctaaatagcagtgcttaaaaaggttaatattttttaaatatacttaaattaaccattcactttctattttaagatatttactttcaatagtttgtgagacttttcaatgactcgtaagtctgcaattggatcaaacagcaccagtttatatgaataacttattttaatattaaacgtgtttaaatagtgaaatgatcatattaatatttataagaatattctgaaaaatatattgaagtgtctcgtgcttaatcgtataatatttttatgtttaaacaatagggggaatcttatgattgaaaaattagtaacctttttaaatgaggttgtttggagtaagccattagtttatggtttgctaattactggtgtgctatttacattgcgtatgcgattttttcaagttagacattttaaagaaatgattcgattaatgtttcaaggagagaagtctcctaatggtatttcaagttttcaagcgatagccatgtctttagcaggcagggttggtacaggtaatattgtcggtgtatctactgcaatatttataggaggacctggtgcagtattttggatgtggattactgcgtttttaggtgcaagtagtgcttttattgaatctacacttggtcaaatattcaagagagttgaaaataatgaataccgtggtggaccagcgtattatattgaatatggtattggtggtaaatttggtaaaatttacggaattatctttgctattgttacgattatctcagtaggtctattgcttcctggtgtgcaatctaacgctatagcaagttctatgcataatgcgattcatgttccacaatggttaatgggtggtattgttgtagttattttgggattaattatttttggtggtgtacgtagtattgccaatgttgcaacagccgttgtaccatttatggcaattatttacatactgatggctgtcattatcatttgtatcaatatacaagaagtgccagcgttatttgcattaattttcaaatcagcatttggattacaatctgcttttggtggtatcgttggcgcaatgatagagattggtgttaaacgtggattatattcaaatgaggctggtcaaggtacaggtccacacgcagcagcggcagcagaagtatcacatccaagtaaacaaggtctagtacaagcattttcagtttatattgatacattatttgtatgtactgcaactgctctgattatacttatttctggtacatataatgtgactgatggtacggttaatgcgaatggcacaccgcatttaattaaagatggcggtatttatgttgaaaatgcaacaggtaaagattattcaggtactgcgatgtatgcacaagccggcattgataaagcgttccatggcagtggttatcaatttgatcctactttctctggcgtaggttcgtactttattgcatttgctttattcttctttgcatttactacaattttgtcgtactactacattacagaaacaaatgttgcttatttaacgcgtaatcaaaataatcaagtttcatcgatatttattaatattgctcgtgtgattattttgttcgctacattttacggtgcagttaaaacagctgatgtagcatgggcattcggtgatttaggtgtaggtctaatggcttggttaaatatcattgcgatttggattttacataagcctgccgtaaatgctttaaaagattatgaaattcaaaagaaacgtttaggcaacggttataatgcagtttatcaacctgatccgaataaattacctaatgctgtcttttggttgaagacgtatccagaacgtttaaaacaagcacgtgccaaaaagtaatctacttttgtttatagtatatgtagtgatcatttgataaaaaagaaaagtattgagaattttaggtgctcagaaatttgaattttaaaaatatagtgtctcttggtacaataacaatacaactactaggggcacttttttatgtcagaatttaaaactggtaagattaataaacatgttttatatagtaatattttaaatagagatgtcacgttaagtatttatttaccagaatcttataatcaacttgttaaatataatgtcattctttgctttgacggattagattttttacgtttcgggagaatacaacgtacatatgaatcgttaatcaaagaagcgcgtattgatgatgcgatcattgttggattccattatgaagacgttgataagcgtagagaggaatttcatccacaaggaagtcgttctcatttaactattcaatcagtcggtaaagaaatattgccatttattgactcgacgttttctacactgaaagtaggtaatgcaaggttattagtaggggatagtttagcgggtagtattgccttattaacggcgttgacctatccaacgatttttagtcgtgtagcaatgttaagtccacattcagatgaaaaagtattagataagctaaatcaatgtgcaaataaagaacaattgacaatttggcatgtcattggtctagatgaaaaagattttactttaccaacaaatggtaagcgtgccgatttcttaacaccgaatagagaattagctgaacaaattaagaaatataatataacttattattacgatgaatttgatggtggtcaccaatggaaagattggaaaccattgctgtcagatatattattgtattttttaagtaaaaacacagatgatcaactttatgaataatttacattagtagatttagtatgaattgtcttcatatagtctggtctataatataatttataaaagattttactgtttaatttaatttaaatttgacgaaattgcaaaagatgtataatgaattatttttaatgtaacggttttcaaagaaatttgatataatagcaataggttaaacaaaggaggaattcagatgattttaggattagcattaattccatcaaagtcatttcaagaagcggtggattcttaccgtaaaagatatgataaacagtattcacgaattaaaccacatgtgacaattaaagcgccatttgaaattaaagatggtgatttagattctgtcattgaacaggttagagctcgtattaatggtataccagcagtagaagttcatgctacaaaagcttctagcttcaaaccaacgaacaatgtgatttactttaaagttgcgaagacggacgacttagaagaattgtttaatcgctttaatggagaagatttctatggagaagctgaacatgtttttgtgccacactttacaatagcacaaggactatctagccaagaattcgaagatatttttggtcaagtagcattagctggggtagaccataaagaaattatcgatgaattaactttgttacgttttgacgatgacgaagataaatggaaagttattgaaacgtttaaattagcttaagtaacataatagtattgttaatcgtagtatgtttgaattaataagaaaatggtcatttttattgaatgtaataaaaatgaccattttctttattttaaaatacgttttaaccttacttagctttttctctatttactataaagtagcttccataaaatacagctaagactaaaaagattaatgccgagaaataaaatgtattgtttaaattgttggtaaattgtgtaattaatccgccaaataatggccctatcattgagccgaatccttggatactattaaaaacaccccaagtttcttcttgttcatctgatttgataaatcgtgccataaaggtattccatgctggtaataagatgccatacattagaccgatagctaaagcgataatccacaagatgtgaatattaacaatcatagatagagtaaaaattaatatcatgtataaaataaatccgcttagaataacaccatacataaagtttctgctgcggttatctattagtttcgataaaaatagcatcgaaactgcacagccgataccaccaataatgattgcaacagtatattcaattgtgcttacgttaataaccttagtagcatatgttggtaatataggaactagggcagcaattgcggcaccttgtaaaagaataccagggaacaacaataaatggcgctttgtcacatcaacaatttgtctcaattgagctttaactggacgagtattataatttgttaactttacatcgacaaaataatataatatccatgcaattaaaacgactaaagacatcatgaaggcaaagcgtgttgggtgcactttgataagtagattcataaaaaccatacctaccaataggcctaacaaccatgaaaaataaacatagcccatttgtttgccacgtttatcttcttcaacactggataacataatgacccaaataggactaactgcaataccgagcatcatagcactaaatatgattacaaaaggtgatgctggaaaccaaataactaaaaataaacttgtaaatgctaaaataaatccagtcgttaaaacgatttttgtgccgaattttttcagtaaaaatcctataacaaagtttgtagatgcatcagcaataaaatgtattgaaaatgctagagacgttattgctacagcaatggatgtaactgttggcaagaaattaatatagcttaggatatacatgcctctcgcaaattccattaaaaataagataataagcattaaaatgaaatttttatgattagcgtaattatttaacgaagaatcttgcatataaaggaacctttccataaatctcttgtggttgtgatgaatgaccgattaaatcaagtaagtctcgacatattgtctgtgtagcatacttaattttatcttgttccattgtactaatcatgttagttaattgctcattaccgttagttaaacttgctacaatttttattgcttcttctggagtatcagcgattttaccaaaacctttttcttcaaagtaaagggcattttcaagctcttgaccaggtgcaggatttaggaaaatcattggaatacaacgggcgaaaccttcagttattgtgataccaccaggtttcgtaatcataagttgacttgatgccatccattcattcatgtgtttggtataacctagaatcaatacattctcgttagatttaaacttagctgttaaagaacgctttagctctttgctcttaccacaaatcataactacttgtgcatttgcacttttcgctaatatatcagtaatcatcgtgtcaaaacctttagatacaccaaatgcaccagctgacattaaaatagtttgcttatctggatctaagttgttgtctattaaccactgcttttgattaataggcgtttcaaatttgttatcaataggaatacctgtcactttaactgttgaaggatcaatacctacgtctatgaagtcttgtttcgtttcttttgttgccacataatatcttgttgaatacggcgtaatccagtttttatgtaagcgatagtctgtcatcactgtagcaactggaatattaatgttaaattgctcagttagtaccgacataactggtgtaggaaacgttaataatattaaatctggcttttcttttatcaataaattaattaacttattaagtccatagtatttgtaaaaacatttgtctagtttatctgggcggctgtaataaaaccctttgtacatatttctaaaatatttaaagctattgatataccattttttacaaatagaagtcaaaattggatgagcttccataaataaatcgtgctcaatgacgcttaaatggtctagattcatatcattaagttgattaacgatactctgtgtaacttgcatatgaccgttaccgaatgagccagtaataatcaatatctttttattttgagtaaccattaatagccaccctccgttagtttgaaaattttatttaagtgtaacttattttacggcattataaaagaaataaagacgcaaagtcgttacatttatagcaattttaatctatagatgaattgatacaaaataaaacgttattttataaagcaatttattgttctatgttttatttgtatatttaaaattatccagtatacaattatagcatatttttggaaacaattatgatattataccatgttacaagatggttttaataatttaagatgagccataattgtaaaactaattcataataccgtatgttttatttttaatagtagaaattagaaaatgctgattagtaggatataacagtgaaattataaatttattaacatcaacaaaacgtgtataataaacatattgtagaaaaaggagcggttcagtttggatgcaagtacgttgtttaagaaagtaaaagtaaagcgtgtattgggttctttagaacaacaaatagatgatatcactactgattcacgtacagcgagagaaggtagcatttttgtcgcttcagttggatatactgtagacagtcataagttctgtcaaaatgtagctgatcaagggtgtaagttggtagtggtcaataaagaacaatcattaccagctaacgtaacacaagtggttgtgccggacacattaagagtagctagtattctagcacacacattatatgattatccgagtcatcagttagtgacatttggtgtaacgggtacaaatggtaaaacttctattgcgacgatgattcatttaattcaaagaaagttacaaaaaaatagtgcatatttaggaactaatggtttccaaattaatgaaacaaagacaaaaggtgcaaatacgacaccagaaacagtttctttaactaagaaaattaaagaagcagttgatgcaggcgctgaatctatgacattagaagtatcaagccatggcttagtattaggacgactgcgaggcgttgaatttgacgttgcaatattttcaaatttaacacaagaccatttagattttcatggcacaatggaagcatacggacacgcgaagtctttattgtttagtcaattaggtgaagatttgtcgaaagaaaagtatgtcgtgttaaacaatgacgattcattttctgagtatttaagaacagtgacgccttatgaagtatttagttatggaattgatgaggaagcccaatttatggctaaaaatattcaagaatctttacaaggtgtcagctttgattttgtaacgccttttggaacttacccagtaaaatcgccttatgttggtaagtttaatatttctaatattatggcggcaatgattgcggtgtggagtaaaggtacatctttagaaacgattattaaagctgttgaaaatttagaacctgttgaagggcgattagaagttttagatccttcgttacctattgatttaattatcgattatgcacatacagctgatggtatgaacaaattaatcgatgcagtacagccttttgtaaagcaaaagttgatatttttagttggtatggcaggcgaacgtgatttaactaaaacgcctgaaatggggcgagttgcctgtcgtgcagattatgtcattttcacaccggataatccggcaaatgatgacccgaaaatgttaacggcagaattagccaaaggtgcaacacatcaaaactatattgaatttgatgatcgtgcagaagggataaaacatgcaattgacatagctgagcctggggatactgtcgttttagcatcaaaaggaagagaaccatatcaaatcatgccagggcatattaaggtgccacatcgagatgatttaattggccttgaagcagcttacaaaaagttcggtggtggccctgttgattaataaaagatttattgatgaaggtaaaactattgatgtttatttattcgaagcattaaataaccagataatcattgctataccagattggttttggtcatatcagatggcaatgacattagatgaagaaacttgttttgaagcaatactcatgcaattgtttgtttttaaagaagaggaagaggcagaatcgattgcatcacaactaacagattggatagaaacatataaaaaggagaaagactaatgaacttaaagcaagaagttgagtctagaaagacttttgcgattatttcacatcccgatgcagggaaaacaacgttaactgaaaaactattgtacttcagtggtgctattcgtgaagcgggtacagttaaagggaagaagactggtaaatttgcgacaagtgactggatgaaagttgaacaagagcgtggtatttctgtaactagttcagtaatgcaatttgattacgatgattataaaatcaatatcttagatacaccaggacatgaagacttttcagaagatacgtatagaacattaatggcagttgacagtgctgtcatggtcatagactgtgcaaaaggtattgaaccacaaacattgaagttatttaaagtttgtaaaatgcgtggtattccaatctttacattcattaataaattagaccgagtaggtaaagaaccatttgaattattagatgaaatcgaagagacattaaatattgaaacataccctatgaattggccaattggtatgggacaaagtttctttggcatcattgatagaaagtctaaaacaattgaaccatttagagatgaagaaaatatattacatttgaatgatgattttgagttggaagaagatcatgcaattacaaatgatagtgattttgaacaagcgattgaagaattaatgttggttgaagaagcgggtgaagcctttgataatgacgcgctgttgagtggagacttaacacctgtatttttcggttcagctttagctaactttggtgtacaaaatttcttaaatgcatatgttgattttgcgccaatgccaaatgcgagacaaacaaaagaagacgttgaagtaagcccgtttgatgattcattttcaggatttatctttaaaattcaagccaacatggaccctaaacaccgtgatagaattgcctttatgcgtgtcgttagtggtgcatttgaacgtggtatggatgttactttgcaacgtactaataaaaagcaaaagatcacacgttcaacgtcatttatggcagacgataaagaaactgtgaatcatgctgtagcaggcgatatcattggactatatgatactggtaattatcaaattggagatactttagttggtggaaaacaaacctacagtttccaagatttaccacaatttacgccagaaatttttatgaaagtttctgctaaaaacgtcatgaaacagaagcatttccataaaggtattgaacaattagtacaagaaggtgcgattcaatactataaaacattacacacaaaccaaattattttaggtgctgttggtcagttacaatttgaagttttcgaacatagaatgaaaaacgaatataatgttgatgttgttatggagccagtaggccgtaaaattgcacgttggattgaaaatgaagaccaaattacagataagatgaacacatcaagatcgattttagtgaaagatagatatgacgatttagtattcttatttgaaaatgaatttgcaacaagatggtttgaagagaaattccctgaaattaaattgtatagtttactttaacagctcaattgtataatcgaatttgttacattaaaaataattgtttcgttgaagaaaaataaattgtatattttaaaagaaaaaggtatactatgatgtatcaaatgaataacctatggcattttgtcagaggggagtaacttaagaatcatgaccgtataaatgattcgacactttatcgtcattacgaagatatcttccggtaaagtgggcaatttaaattgcttagtgagacctttgctatttatttagcataggtctttttgtttgtacttaacttatttatttaaaggagttgtacatgttaatggatccaagtttgatcttaccttatttatgggtacttgtcgttttagtatttttagaaggcttattagcagcagataacgcgattgttatggctgtaatggttaagcacttaccacccgaacaacgtaaaaaagctttgttttacggtttgttaggtgcatttgtatttagatttttagcattattcttaattagtattatcgcgaacttttggtttattcaagctgcaggagcggtttacttaatttatatgtcaatcaaaaatctgtggcagttctttaaacacccagaaattgaaagtcctgaagctggagatgatcatcattatgatgaatctggtgaagagattaaagcaagtaacaaatcattctggggaactgtgttgaaaatagaatttgcagatatcgcatttgccattgattctatgcttgctgctttagctattgctgtaacacttcctaaagttggtattcactttggtggtatggacttaggtcagttcgtagtcatgttcctaggtggaatgattggtgttattctaatgcgttatgcagcaacatggtttgtagagctattaaacaaatatccaggacttgaaggtgcagccttcgcgatcgttggttgggtaggtgttaaattagttgtcatggtattagcgcacccagacatcgctgtattgcctgagcacttcccacatggcgtattatggcaatctattttctggacagtactaattggattagtaattatcggttggttaggttcagttgttaaaaataaaaaatcgcataaataattgatgtgaagcggacaatcttaatttagtttaaggttgtcctttttcatttaattgagtgatttatgaaaaatggattttgaagaatgtgaatcaaaagatgcgatatagtattaagaaaatgtgccttttatatttagcattttttcaatagaaattatatagattttaaagcaaattaggtgttaatgtgtcataatgataagtgattttattgaatggagtggacattagtggatattggtaaaaaacatgtaattcctaaaagtcagtaccgacgtaagcgtcgtgaattcttccacaacgaagacagagaagaaaatttaaatcaacatcaagataaacaaaatatagataatacaacatcaaaaaaagcagataagcaaatacataaagattcaattgataagcacgaacgttttaaaaatagtttatcatcgcatttagaacagagaaaccgtgatgttaatgagaataaagctgaagaaagtaaaagtaatcaggatagtaagtcagcatataacagagatcattatttaacagacgatgtatctaaaaaacaaaattcattagattcagtggaccaagatacagtgaaatcaaaatattatgagcaaaattctgaagcgactttatcaactaaatcaaccgataaagtagaatcaactgaaatgagaaagctaagttcagataaaaacaaagttggtcatgaagagcaacatgtactttctaaaccttcagaacatgataaagagactagaattgattctgagtcttcaagaactgattcagacagctcgatgcagacagagaaaataaaaaaagacagttcagatggaaataaaagtagtaatctgaaatctgaagtaatatcagacaaatcaaatacagtaccaaaattgtcggaatctgatgatgaagtaaataatcagaagccattaactttaccggaagaacagaaattgaaaagacagcaaagtcaaaatgagcaaacaaaaacctatacatatggtgatagcgaacaaaatgacaagtctaatcatgaaaatgatttaagtcatcatataccatcgataagtgatgataaagataacgtcatgagagaaaatcatattgttgacgataatcctgataatgatatcaatacaccatcattatcaaaaacagatgacgatcgaaaacttgatgaaaaaattcatgttgaagataaacataaacaaaatgcagactcgtctgaaacggtgggatatcaaagtcagtcaactgcatctcatcgtagcactgaaaaaagaaatatttctattaatgaccatgataaattaaacggtcaaaaaacaaatacaaagacatcggcaaataataatcaaaaaaaggctacatcaaaattgaacaaagggcgcgctacgaataataattatagtgacattttgaaaaagttttggatgatgtattggcctaaattagttattctaatgggtattattattctaattgttattttgaatgccatttttaataatgtgaacaaaaatgatcgcatgaatgataataatgatgcagatgctcaaaaatatacgacaacgatgaaaaatgccaataacacagttaaatcggtcgttacagttgaaaatgaaacatcaaaagattcatcattacctaaagataaagcatctcaagacgaagtgggatcaggtgttgtatataaaaaatctggagatacgttatatattgttacgaatgcacacgttgtcggtgataaagaaaatcaaaaaataactttctcgaataataaaagtgttgttgggaaagtgcttggtaaagataaatggtcagatttagctgttgttaaagcaacttcttcagacagttcagtgaaagagatagctattggagattcaaataatttagtgttaggagagccaatattagtcgtaggtaatccacttggtgtagactttaaaggcactgtgacagaaggtattatttcaggtctgaacagaaatgttcctattgatttcgataaagataataaatatgatatgttgatgaaagctttccaaattgatgcatcagtaaatccaggtaactcgggtggtgctgtcgtcaatagagaaggaaaattaataggtgtagttgcagctaaaattagtatgccaaacgttgaaaatatgtcatttgcaatacctgttaatgaagtacaaaagattgtaaaagatttagaaacaaaaggtaaaattgactatcccgatgtaggtgttaaaatgaagaatattgccagtctaaatagttttgaaagacaagcagttaaattgccaggaaaagttaagaacggtgttgttgtagatcaagttgacaacaatggtttagcagatcaatctggtctgaaaaaaggtgatgtaattactgaattagatggcaaacttttagaagatgatttacgctttaggcagattatatttagtcataaagatgacttgaaatcaattacagcgaagatttatagagatggtaaagagaaagaaattaatattaaactaaaataatgttgaggtgaacaacgtgtcaatttttagccagtttttaaaaagatcaagccctcaacaaggtattgtattgtactatatcgtcgcaattgtcattgcatttttattattaaacttaccgtatgttcataaaccaggtgtagaagtaaatccaattgacacattatttgttgccgtatccggaattagtgttactggattgtctccgataagtattgtcgatacctattctacatttggacaattaattatcctcgtgatattaaatattggtggaattggcgtcatggcaattggtacgatgttatgggtggtactaggtaaacatattggaattagagaacgtcagttaattatgttagataataacaaaaacacaatgagtggtaccgtcaaattgattattgatattgtaaaatcaatatttgtaatcgaactcgtaggagccatgttattagcattttacttttatcgagataatccagatttaaaatatgcaatcatgcaaggtgtttttgtttctatttctgccactaccaatggtggattagatattacaggtaagtcattaattccttatgcacatgattattttgtacaagcgatagttatatttttaataattttaggatcaatcggcttcccagtattattagaagttaaagcttatattcaaaatagggttactaattttagattttcattatttactaaaattacgacatcaacatatttattcctatttattgttggggtattagccattctattatttgaacataaccatgcgttcaaaggtttaagttggcatcaatcgttattctattcgctgtttcaatcagcgactacaagaagtgcgggtcttcaaacaattgatgtgacaacactaagtgaccccactaatattatcatgggtattttaatgtttataggatcttcgccaagttcggttggtggcggtattcgtacaacaactttcgctattttaattttgtttttaattaactttagtaataatgccgataaaacatccattaaagtttacaatagagaagtacacattatggatattcaacgttcatttgcagtatttacaatggcgacaattttaacatttttaggaatgctaattatatcagctactgaaaatggtaagcttacatttttacaagtattttttgaagtcatgtctgcatttggaacttgtggactatcgcttggtgtcacaagtgatattagtgatatttctaaggtcgtactaatgatactcatgtttataggacgtgttggcttaatatcatttatcattatgatagcaggacgtcgagaaccagataaattccattatccaaaagaacgtattcaaataggataatataatagcaatctaagtttagttaatgtagattttaactggaacttagattgcttttttagtttgtatttttaacttattttataagacgattggtttcgaaaatggtaaactagtaacaatgagaggtgtaacatgatggaaaaaaatgaaaacattaatgtagagattttaactacgtcagatatgcatagtcatttcttaaatggtgattatggttcaaatatttatagagctggtacttatgttaaccaagtaagagcacaaaatcatcgcgtcattttattagatagtggcggaagtttagctggctcgttagcggcctattattatgctattgttgcaccttataaacgacatccaatgataaagttaatgaacagaatgcattatgatgctagcggtgtgagtccaagtgaattcaagtttggtttatcatttttaactcgttcaattgctttggcacgttttccatggttatcagcaaatattgaatacaatgttactaaggagccttatttttcaactccatattgtattaaacattttggtgacttaaaaattgctatcgtaggcgtcacagcagatggtttaatggaaaatgagtattctgaaatggagcaagatgtatctattgaaaagacattagtggcatcaaaacgttggattagatatatccatgaagttgaagagccagattttttgattgtaatttatcatggtggattgaataaaattagtaatagtacgaaaaataaaaaggcaagttcgaatgaagctgaaaaattaatggaagaactcggtgttatagatttaatgattacagctcatcagcatcaaacaatagtaggtcaagatcatgaaacgtattatgttcaggctggtcaagatgccaaagagcttgtacatctttcgattaattttaaaaagagaacaacaacttatgatgttgaaagcattgattctaaagtgattgacttaaatgagtatgaagaggatcaagaattattagatttaacattctatgatagaaaagcagtggcttattggtcacaggaaatcataagtgataaaggtttgatgttatcagtaaatgggttacaagatttagtctgtcaaacacatccattttcgcaattattacatgatgcaattcaccttgcatttgataatgatataacatgtgtccacgtgcctatgaacggagagaaggggttgagtggacagattcgaaatgaagatttgtatcatgcatacccatatccagataagccaatggatatgacaattagtggtcaaaatatcaaagatatattggagtatagttattcacatttagattttgttaacgagcaattaagcttaacaattattgatgaaacgttatgtacaatgtggcaaggattcaattatgagattgatatgaatcaagaacctgggcaacgagtaatgttagatcaaattgatttgactaagagttatagagttacaatgactgactattgttatcgtaactacaagaattatttaaaaaatgctattatacatgaatcatacgatgaaacaatgagtacattaattgcagagaagttaagagatccgaattatcgtatttcatgtagtgataattttatagttaaaaacaggtaaatattgctatgtaataaattaattataagttcaacaagtataaaaacctttcttagagaagattatctaggaaaggtttttagaattttaaaattgatataaaagaacagtgaaattctcattcattatatataagtaaacaaaaaagctaaaatggtatataccattttagcaagtaacggaaacggagggattcgaaccctcgcgccgctttcgcgacctacacccttagcaggggcgcctcttcagccaacttgagtacgtttccaatggctccacaggtaggactcgaacctacgaccgatcggttaacagccgatagctctaccactgagctactgtggattaatttgtatgtgtttgaatatcaagcacaaatattattataacaagattaagttaatttgcaatagataccttaaaaaaatatgcagaacatttacactatatttataaaacattccgcatattttaaaaataaacaatttatttatcttcaaataaagaatagcgtgtcaatgcttcaaacacattcaatgtggctttattataatctattggttggtcgggattttttgatatcatgcgagattgtttatctaccatgtaatagtaaaaaatggaattgttatattgatgccataaactgtggtatgaaacatgaagaatgattgattcattattaataaatgtcactttacatttacgattttttaattctttaatactttcgatataatgcatatttaaccaaatattttcattttgtctgtcagaatgtgttgggaaaaaataagttggaaataatggtgttagtaaaataggtggtttactagaaatgccagtaatgcggtttgtctctgctttcttgccaagataagtattaccataaaatttgcaagagcgttcaatgattttctggactttaaaaggattttgaatacgcgttttgtcaaaccgaattatttcactaccgtttctttgatcgtcatcatcaaatgctggtcgaataaccatgtctcctttgcgtatcacataaatattttgagaatacataagcaaaacctcgctttattaagttttaaaccattaatataaaaatacaattaatgatataaagatattttataataaaattctgagttgtcaagttattattttggtgaaaatgtacaataatttttaactaatagtcagaatattcattgatttcaaaattagaaaaatgtatacttattataaattaaagaaaggtagtggtttctatgaaatacaatactaatgttaaacatacaactttagaagcgtttgtcacaactgtcaatgatttgggtattgaattaattatcaatgaagcacttcgagaggtaagaaaacgacagctcatagaacttatagatgacgcactcgtcaataaagatgaagcagcatttaatcaatatacggcagaatacaaaaatttggaggcatttctcggtgaataacattgattcgaattccataacgcaatcataaaaggactattcttaacatctcatacatgtaagaatagtcctttaatcgtttatgacattaatctaattaattcatgtctatctatgtcaccgaaataatgatataaatcatattctgatagtgcttcttctatgtgctcaaagtcgtgtagacagccaactaatgcattttcaagatcagtgacatctccgacaccaaagaaatcaccgaatatttttgcatgttcgattttacctcgtttaacatcaaacttaatttgtacaaatcctttttcaaatttttcctcgcgttcaaagttatatttagggtttctaccataattccattcccaagttctatatttgtcgttacttaacttttcaatattttcccaatcttcatccgttaatttatattcttctacttcagtttctccaaagatagttttcaagatgatttttttaaattcttcaatttctaaagggtcatttaaaaattcttgaatgtttgctacccgtttacgaacagatttaataccttttgatttaatcttagctggattaacttttagtgcattctgaacttcgtctaaatcactatttaacatcaacgtaccatgactaaacattctatttttaactttaaccatagcattccctgagattttcgcttgtccaacttgaatatcgttacgaccagttaattcagcatttacgcctaaagattgtaatgcttgaacaattggttcagtgaatttttggaaattgtggaaactgttaccatcatcatctgttataaaactaaagtttaaattgccagtatcatgataaacagcgccaccaccagaaattcttcttactacatcgatgttgtgagcatcgatatatgtctgatttacttcctctatcgtattttgattctttccaacaatgatagatggtctatttatgtaaaataaaaagtaactttcttctgctggtaaattttttaaaacatattcttccattgctaagtttaaagttggatctgtaatattattattactaatgaatttcattacaatctctcccttatatctatatatattctctacttatttatgccttaactttgctcaaaatgccaattatatactcacaaatcattctaaatatcggcttaaagttacattttattatttttgattgttaatagtttatttgttaagtgaattttagtacaatataatttagttatgatttaaggaggacttaaaatgactgttgcagaagtgggtaacattgttgagtttatggatggattaagaggtcgtgttgaaaaaatcaacgataactctgttattgttgacttaacaattatggaaaattttaatgaccttgatttaccggaaaaaactgttatcaatcataaacgatataagattgttgaataagaaggtaagttataatgaataaaatctcgaaggctttaacttggtttattataagtttcattatatttcatctcatattatttattatgtggggcgaacaccaagaatactggtatttatatacaggtataatgctaattgctggtatcagttatgtattttatcaaagagatattgaatctaagcggttgcttacatcaattggtgttggtattattacggcaattattttaattatgcttcaacttttattctcacttataacttctaatttaagttatagttcattaattaaagaattagcaagaacaggtgtcaattggaagtggcaaatgttagtaactttactttttgtcattccatgtcacgagttatatatgagaactgttttacaaaaagaattaacacatttttcaataccgaaatgggtagctatattaataactgcaatttgttctagttcattatttatttatttagataattggtggatagtaacatttatatttgttgcacaagtgatattatcattaagttatgagtatactcgacgtatagcaacaacatccgttgcacaaattgtagctattatattgttattaatttttaatgcttaaataagcttttcttagacgtatgtgttctaagaaaagcttttttgcttaagaatagcaatacgaagattcgaggcatgcttcattatagtggtaatattttttaacagcaagcggttattattgagattaggttttagtcagtttttattactaaatattttataaaaatggtataatatttttgagcaagttgaattgatggtggctatctgagtaaaggggggtggtgcctatggcattacttaacacttttgaaaggaaaagcctattgtgatatctattgcaaacgcattacatttaatgttaagtttcggtatgtttatcgtcactttcattggtatagtagtagcaataataaatttaagcaataaaaaataaccatcatttcaaaactttgacatagaatgatggttaaagaaaatctcatttagtcaccgtctttttaacgggctcattaggcgacatgttcctgcatgtcgtctttttacatttttatagtaacatatcttttatttaattgtctatttttattagatgtgtaacaaaattttgaagtattttccgtatattgcctgctaaacatgtcagatttgaaaggaaaatcatactgtggtagaaatcaattatgattatatggtagtacttataaataagtgatttctattgaatatgtaatgaagttcatatattaatataactttcattgatatagaagtcgcaatgattaatttaaacaataaaaaacaaccatcatttccaaactttgacaacgaatgatggttaaagaaaatctcatttagtcaccgtctttttaacgggctcaataggcgacatgttcctgcatatcgtctatttatacactgcacaatttaataataatacaattatactttgatgtccatttaacataaagtggttgaaatttgcagcaaataaattaaccttgactattttcagaaaattctgtataaataacgaaaaagagatatggattaaatatgaagaggtgtttttatagaagaataaaatttttggcactatattatatttaactttagcacttggattatcaacagcagcttatgcatctacagaatacgcagaaggaggcacttggagtcatggtgtcggcagtaagtatgtttggtcgtattattatcatggtcataaaggacatggtgcaacagctattggaaaatatagatcatttagtggttatacaagagctggtgtaaaagcaaaagcatcagctactaaacataattggtgggtcaatagagcgtattataacatttattaaatactaaaaaatcatagaaaataaacaacgcaagaggtacaacatgaaatggttcaaattaatacttgatgttacaatcttcattctgattgctatattgttatttgtttatacatataaagaaaacgaagaaatattgcctgatactaaataccctatagcggtaactgactggaataaaaaatatagtaaaaatgagatttataaacgtatagatcaattcgctaaaaatgagaacgtagcaatctataaatcaacttcaaattatacaaacaaaaacgtagataaagatatatatgtatttaataaatcaaaagcagcaactatcactccttttaatgctaaatataacattcattatttaagtgacgacgaagtattaaaaaaagatatcaaagggagttattttgtaaaagacaaaaattttgacgtgtctaaattcataaattttttaaaagaatatggtgttactgctgaatcatacaaaatagatcatatgatgattgccgttggtgtcattaaacaaatgaatatagtagttccattatcctcacttttaatcgtttattttatttattatattttcgaaaagaacattaatttcaaagcgtatgcgattaagtatttaaatggttttacattaagaaaaataattttcgaaaatttttcaaagaaatgcacgtattgggtaacgttaatcataactcaaattcttttaactacaagtgtactttggatattaaattacacgggtaatttagatttattcatattaagaatagttctgctttcatgtcttttcattttaacgattagtgttattaatttatggactttcttaatgttactaaatttaaatattgcaaatatgattaaaggtaagcagcactttaaaacaattcgttttattaatacagtttgtaaaagtattctcttagtactaatagctaatgtaatgatagaaaatactagtgttattaaagatttgaataaaataaaagaaactgagaaatattggaatgtattagatgattattacacgattgaatttgcaccttatcacgaaacaaaacaaagtttgattgataatatggtgcgatcagaacaattagtaaaggctagtgaagcagaaaataatgcgattttattcaaaccaaagggtgactccgttgacaatgacaacttttcgcctgatgaggggaatgtaatattagtaaataatcagttctggtcgatttattacaagcagtttcaacctgatattccgataaaaaatcaaaaaaataatgtcgaagtaattattccacaaaagtttcatgcaatgcgtaatgaaatcaatcaagcatatcattcatggtttgaatttgtacaaaataaaaataataaagagaataagttatctatacagtttatcaacaaaaatgattgtcgaattttttcatttgatgcacgagatagtcgccatttgtcatttatagaggcgccaatcattgtgaatgttcaggcatcagatttatcgaatgatttttattatgccatgatcagtcaaggcgggtatttattcaaaaattatgacgcgctagtaaaaaatattgaaaagtatcatcttgatggggaaatcagtggaataaccaattataaagatagcgtgatggaaatgtatcatgaaaacaatttgaaattaacagtactcaacttttcacaaatcattatcgcaatcattttaataattattattttatttgatgtgaaatattattttgaacagcatcgaaaattactcgtaatcaaaaagctatatggttattcaacattaagagccaattaccaatacttattaataaataatatagttgttatttttattggaatattgacgaatgtaattttacattctcactatataatgatgttatttgcaacgattcttgtcgttcaaatattattgcagatttgcagcctatactatcatggccgacgttttaatgaagttatcaaggagttttaactatgaaatttatcattgcaatattattaggattaatattatccattactattgcttttacaatcatacatcatcctatacttgatcgttttaatcctttcttaaaaacggagtatagttatgccaaagtgccaaaaggtacgcaacaatatgttaatattacggcttatagtgaaagaggggaaaagcttgattataaattaacatttaatggattttcacctagtagaacgtatgtcgaaataaagcataaagggcaatatgtcatatcgatcacatatgttgaaaaagaggatacaccaaaagaggtaagacaagaatgatagaattaaaagatttaaccatacaaaaaggtaatacacatattttgaagaaacttaatttgaaatttcaatgtggaaaatcatatgcacttattggtaaaagtggatgcggtaaatctacattattaaatactattgctggacttgaaaaaacaggaaaacaatatgtctattttaatggtcaattagaacaatttaaatctaatttttacagagataaattaggatatttatttcaaaattatggattaatcgataatttgacagtaaatgaaaatttagatattggattagcatataaaaaaataagtaagaaagaaaaagaacaaataaagatacgttatatagaacagtttggtctgtcaaacagtttaaaaagaaaagttcatacgctaagtggaggtgaacaacaacgtgtcgctttaattagaatgatgttaaaagatccgattgttatgttagctgatgaaccaacgggtgcgttagatcctaaaacaggacagatgattattcaatcattatttggtttggtcgatgaaaataaagtgctgattttagcaacacatgatatggctattgcaaatcaatgtgacgaaataatagatttagaacagtatagaaaagtagcatctatgtgatatccaaaagataaaattaaaagccaatcaatgggaaatgttgacttcaacactccgtttgattggcttttatactgtgttactaagttatgaaagtaacaacggcaaactgaaaaaaagcaatataataatatttaatacgattagtaataaatgtaattgatttttcgttttaatatagcaaaaaacaatgactaaagataacaacaatatcatgattgcacctgggaagaaccataatgctgaagctgtgtaccaaatcattggtaacgccataataataaaagatataagacaagaaaggataccaataatattataagttctagtcaaaattacacctccaattttcactttaaaatgacatgcgtaaaacaatcattttaaatacattatacaataaaattaaattgtgcggtagaagaatttgaaattaaattgaattgtttttggtagttggtatatttataacactctgcaaaagaatgtagcaaaattagataaattagattatttaaaattatgcgtgatattattatttttatcatgcaaataattataataacaatatttaattattgtatttacagttgattaatagcgttgtgaagtataaaattattttgtaaaacaattttgttattaagaggtgcgctatggaaaaggggattttcaattacgataatgcgaatgtattaaaattagatactaatcagttaaatgaaaacataaaagtcattgacgatatatttaaaaattatgagcagatagagccaactatagaagtcgaaaatggaaatacaaaattaaaattaaatggatattttattgcgtcaattataagcccattaaatttaaataaacttaataatttatatgttgaagaagaattttatcatacatataacgaattaattgttaaatatactgaggtaaaggaataattataatgaaaaaaatatttatgatggtacatgagttagatgtgaataaaggtggtatgacctcttcgatgttcaatagaagtaaagagttttatgatgcggacatacctgctgatattgttactttcgattacaaaggaaactatgatgaaattattaaagctttgaaaaaacaaggtaaaatggatcgaagaacgaaaatgtataatgtatttgagtattttaaacaaatttcaaataataaacattttaagtctaataaattgttatataaacatatttcagaaagactaaaaaatacgattgaaattgaagagagtaaaggtatttcaagatattttgatataacgactggtacatatattgcctacattagaaaaagtaaatctgaaaaagtgattgatttctttaaagataataaacgaattgaacggtttagttttatagataataaagtgcatatgaaggaaacatttaatgtagataataaagtttgttatcaagtattttatgatgaaaagggatacccatatatttcaaggaatattaatgctaataatggtgctgtaggtaaaacttatgtgttagttaataaaaaagaatttaaaaacaatttagcactgtgtgtttactatttagaaaaactaataaaagattctaaagatagtattatgatttgtgatggaccagggagttttccaaaaatgtttaatacaaatcataaaaatgctcagaaatatggcgttattcatgttaatcatcatgaaaatttcgatgatacgggtgcatttaaaaaaagtgagaaatatattattgagaatgcgaataaaattaacggtgtaattgtattaacagaggcacaaagattagatattcttaatcaatttgatgtagaaaatattttcactattagcaattttgttaagatacataatgctccaaaacattttcaaactgaaaaaatcgtaggtcatatttctagaatggtaccaacgaagcgaattgatttgcttattgaagtggctgagttagtcgtaaaaaaagataatgctgttaaatttcatatatatggagaaggatctgtcaaagataaaatagctaaaatgattgaagataaaaatttagaaagaaatgtttttcttaaaggatatacaacaactccacaaaaatgcttggaagattttaaattagtcgtttctacatctcaatatgaaggtcaagggttaagtatgatagaagcaatgatttctaaaaggcctgttgttgcctttgacatcaaatacggaccaagtgattttatagaagataataaaaatggttatttaatagaaaaccataatattaacgacatggctgataaaatacttcagcttgttaataatgatgtattagcagcggagtttggttcgaaagcgagagaaaacattatagaaaaatattcaacggaatcaatattagaaaaatggttaaatcttttcaatagctaaatgaaaaaatcctaggtattcatgagtacctaggatttttacgcatgataaatacaaaaaaagagaggatagtcctctcaaacaatagttaataaaattgtagccatttcttccagctgtaactactaatacaagctaagttcattacgatatgtatgatttcaaattcataaccacttacatatcctcttgtaagtttaagtgtgaagattgagcctaacataacacaaatataaaaaacattaacataaggcgttaaaaagccgataataagtgctaaacctccaacaacttcaccaattgacatcaatactgcgatggtaggtggtaaacctaaagagcctaagaagtgaattgttccatctaaatcaacaaatttcaaagtaccatgcactaagaatgatgttgctaacatccatctaattaaaagcatacctaatttcatcatgtcacctccaacattcatatttttaaaacatagtccaaattatatttgtaaacatgtggaaagtaaagattttttataagattaattattaaatattctattgtattgaacaattgttgtagaaagatgtttaagtcatcagttactttttgtatttataaataaagattagtacagcatagtgcaaagattatagggaaatgaattaactattgcatcgctatttatgaatcgtaaacactattatgaaattgcgagagtagtatggacaattagaatgatggtttgagataaatgagtgttattaaccagtgcgtcattttcaaaattagatgccatttgctgtttataataagaagatttgataattaactatgataagaaaaaataataatcccctaaatacattataaacaaattaaatgataaaataataatatatatttctactaaagttgtttggaggtaaatgtgtgaataggaatatcgttaaactagttgtgttcatgctaattttagttgtagcagtagcgggttgtggtcaaaaagatactgaagagaaaactgaaatgacgacaataaaagatgaattaggaactgaaaaaattaagaaaaatcctaaacgtgttgttgtattagaatatagttttgctgattatttagcagcattagatatgaaacctgttggtattgcagatgatggcagcactaaaaatataacaaagtcagtaagagataagattggggcatatgaatcggttggatctagaccgcaaccgaatatggaagtgataagtaaattaaaaccggatttgatcattgcagatgttagcagacataagaaaatcaaatcagaattgagcaaaattgctccgacaatcatgttagttagcggtacgggagattataatgcaaatattgaagcatttaaaacagtcgctaaagcagtaggcaaagagaaagaaggcgagaagcgtctggaaaagcatgataaaatattagcggagattagaaagaaaattgaacagagtacgttaaaatctgcatttgcattcggtatctcaagagcaggtatgtttattaataatgaagatacatttatgggacaattcttaattaaaatgggtattcaacctgaagtcacaaaagacaaaactacgcatgttggtgaacgcaagggtggtccttatatatatttaaataatgaagaacttgccaatatcaatccaaaagttatgattttagccactgacggaaaaacggacaaaaatagaacgaaattcattgatcctgcagtttggaaatcattaaaagctgtgaaagataacaaagtttatgacgttgaccgaaataagtggttgaaatcaagggggattatcgcaagtgaaagtatggcagaagatttagaaaaaattgcagaaaaagcaaaataaaaatacagcgctactcgtaaatcatataagagtggcgctgtatttttaattatgtttattatctgtcggatgtgatgatttacctgaaagtttatttcgaataaatttaattacataaccgacaaggattgttttaacagttcttttaatgaattggcgcatcgttacatacctcatttctctatatcttacgaactatatacccattcatatatgctttttaaacgtcattgtcacaatttaatttttagggaatataatataaccatctttatctgcttttttagtaaaaatgacaaaaattgcatgtattattgagatgatggtagggatacctgtccagaaaaataataagtgaaaaagaccttgtccaaatttatcagcataaaatttatgaatacctaaacctccaagaaataatgcaacaataacataaatggctttattgactttcatttgtaaatcctccttaactataattctacttaaattcgttgtgaaaaccaatatttctaactttagaattttcaaactttctaaaattataagtatatctttttaaaataagctagaatttctatataataaatgttaataacgtaaaagggaatgatgacatagtgatacgtcaagcacgtccagaggaccgatttgatattgcgaagttagtttatatggtttgggatgatatggaattagaattggtaaagcatctacctaaagacatggtattagatgcaattgaaaaaagctgtgttgatgcaacatatcgaactttttatcagcatattttagtttatgaagtagaaaataaagtagcaggttgtattattagctatagtggtgaaaatgaattgaaatacgaaaaagcatgggaactacttgacttgccagaaaaaataaaacaatatggcacgccattacctgtaaaagaagctaaagacgatgagtattatatagaaacaattgcgacatttgcagcatatagaggtagaggcatcgcgacaaagttattaacgtcattacttgaatcaaatacacatgttaaatggagtttgaattgcgatattaataatgaagcagcattaaagttatataaaaaagtaggctttatatctgatggacagattgaattatacaagcacatgtatcatcatttaattgttaaataaaaaaactcgacagttcgatgtaagtcgattgccgagtagtatcattttctattaaatgcctgcaaataatgcactaatataaatacctaatgcatataataaaccgaaaaatgtatttgttttaccagcagcagccattgctggcatcattgtaggcggtgtatcattcttcttgaaacgtctgataactttaacaggcattgggaatgataacaacgcaagtaagtaaaataatgagccaccaggtttaataatgatcgtaagtacaataaaggcataagcgataaagtacatgattgccataaatgttaaagaagcatttttacctaatagaatgggtaaagttttgcgaccacttgctttatctttgacacggtcgcgaatattgttagccatattaattaaaccgatagtgattactataggtacacttaaccaaattacataactttgaatattgccagtttgaataaagaatgcaataacgataataaacatacccataaatacgcctgagaataattcaccgaaaggcgtccatgaaatagggaaagggccacctgtatataggtaaccaacagccatacatactaatccaactggtaataaccaaaatgaagagttagcagctaaaaacaaacctaatattgctgctaagatgtaaaatgcaatggctaatcgtagcacaagctctgggctcataccgttgcgaacaatggcaccaccaatgcctacagattcatgatcatcaaggccttttttataatcatagtattcattaaacatattagttgctgcttgaataagtaagcatgctagtaacatggcaatgaataggctgattttaatatgatcttcgctaccaagaaaatatattttagatgctgctgtaccaactaaaacgggtactacggaagcagttaatgtatgaggacgcattaaatgccaatatttcttaactgtagaatattgctgatattgattactcattgaatacaaaacctctttaaatcatattttttataacaaagatattttaatagaaagtagcataaaggtcaattgacgtgaaaaattgcaagataagtttaagcaattcttgtaacacaattatccaaaaatgatacaatataataatgagtgaaaaaagacgaagaaagaagtgaaatggatggctacgggcgtattagaggacgatattgtcaaagagatatatggcagctcaaaggaatgggtttcagttgaagtgaaattatcacagtcactagacccgagcacattatttcatctcactgacaatgaggcaggagatcgcttttatatgcgtttgaatgataatcgaacgtcatattttggctacaaagcaattcaattattcaaaaataattctaaaaataaacaatctatttttaaagactgggaaaaattaaaacataacatcacatttatacatccgcaatctgagaaacatcatcttcgagttgttggagggttccaattttcaagtcataaatcagatgatgaatggcgagagtttggactaaatcattttgtattacctgaagttttaatttcaactgataataatgggacatttttaacttatacagttaaaagggaaagttttactgttgaggcattgaacgatttaatggatttgttcaacaatatatcggacatagatgtggacgagcaaattgggggaattactagaaatgaagatatttataaagatgactggcgtcaacttgtagtagaagctatagaatctattaataatgaagaaaaaattgtactagcacgtagacggttaataaagttcgataaagatatcagtattccatatattctaaagcaagcatattctaaagaaaaaaacagttatatattcttgttagaatcacaagattctatattcttttcacaaacacctgaacaattaataaaggtcaataataaaatactatcgactaaagctgtagcaggtacaattaaacgttcacaagatgaggacgaagatacaaaaaatgttgaagcatttttaaaagataataaaaacttaatcgaacatcgatttgttgttgacagtattttacatgatattaaaccttatatcactgaattacattatgataagacgcctaaaattctaaaaaatgatcatttatatcacttgtacactgaaataaaggcgccactgaaggatgattcgtatattagtttaattgataatttacatccaacacctgctttaggtggctatccaaaagaatttgcaatggattttattgagcagaaagaatttggtacgcgaggattatatggtgcaccggttggctatatagatatatacgatgattgtgaatttattgttgcaattcgttcgatgcttattaagaaagcacaagcaactttatttgctgggtgtggcattgttaaagattctgatccagatagtgaattggcagaaacgaaccttaagttcacacctatgatgaatgcattaggagtcgatatgaatgggaaatcataaagcagctttaacgaagcaagtttttacatttgcatctgagttatatgcgtacggcgtaagggaagtagttatcagtccgggatcacgctcaacgccacttgcacttgcatttgaagcacatccaaatattaaaacatggatacaccccgatgagcgaagtgcagcgttttttgcagttgggttaattaaaggcagtgaaagacctgtcgctatattatgtacgtcaggtacagcagcagcgaattatacgcctgcaattgctgaaagccaaattagtagaattcctttaatcgttttaacaagtgaccgtccgcatgaattaagaagtgtaggcgcaccacaagcgattaatcaagtaaatatgtttaataattatgtaagttatgagttcgatatgcctattgcggatgatagtaaagagaccattgatgcaatttactatcaaatgcaaattgctagtcaatatttatatggaccacataaagggccaattcattttaacttgccatttagagatccgttaacacctgatttgaatgcaacagaattgttaacttctgagatgaagattttaccgcactatcaaaaaagtatagatgcatcggcattaagacacattttaaataagaaaaaaggtttaattattgtaggggatatgcagcaccaagaagttgatcaaatactaacgtattcaacgatatatgatttgcctattttagctgatcctttaagtcatttaagaaaatttgatcatccgaatgttatctgtacatatgatttgctgtttagaagcggcttagacttaaatgtggatttcgtaattcgtgttgggaaaccagtgatttctaaaaagttaaatcaatggttaaagaaaactgatgcatttcaaatattagtgcaaaacaatgataagattgatgtctttccgatagcgccagatatttcatatgagatttctgcgaatgatttctttaggtcattaatggaagacacgacagttaatcgcgtaagttggttagaaaaatggcaatgcttagagaaaaaagggcgtaaagaaattaaatgttatttggaacaagctacagatgagagtgcattcgttggtgaattgattaagaaaacatctgaaaaagatgcattatttattagtaatagtatgcctatcagagatgtagataacttgttattgaataaaaatatagatgtctatgcgaatcgtggtgcgaatggtattgatggtatcgtttcaactgcactgggtatggctgtgcataaacgaataacattattgataggtgatttatcattttatcatgatatgaatggactattaatgtcaaaattaaataatattcagatgaatattgtattattgaacaacgatggtggcggtattttttcatatttaccacaaaaagaaagtgcaactgactattttgaacggttgtttggcacaccgacgggattggatttcgagtatacagctaagttatatcaattcgattttaaacgttttaacagtgtttcagaatttaaaaatgccacattgttatctgaaacttcgacgatttatgaattgataacgaatcgcgaagataactttaaacagcatcaaattttataccagaaattgagtgaaatgattcatgacacattataaattttatgaagcaaacgttgagaccaatcaagttttagtatttctgcatggatttcttagcgacagccgtacttatcataatcacatcgaaaaatttactgataactatcatgtcatcactatagacttaccaggccatggcgaagatcagtcttcaatggatgaaacgtggaattttgattatattacgacgttgttagaccgaattttagataaatataaagataaatcaataacattgtttggatattcaatgggtgggcgtgttgcattatattatgcaattaatggtcacatccctatatctaatttgatattagaaagtacgtcaccaggtattaaagaagaagcaaatcaattggaacgccgtcttgttgatgatgcacgtgctaaagtattagacatagcaggtattgaattatttgttaatgattgggaaaagttgccattatttcaatcgcaactagaattaccagttgaaatacaacatcaaataagacaacaacgattgtctcaatcgccacataaaatggccaaagcattaagagattatggtacaggtcaaatgccaaacttatggccgcgcctgaaagaaattaaagtaccaacattaatattagctggagaatatgatgaaaaatttgtacagattgcgaaaaaaatggcaaatttaattcctaatagtaaatgtaaattaatttctgctacaggtcatacaattcatgtggaagatagtgatgaatttgatacaatgatattaggatttttaaaggaggagcaaaatgactaacagacaatgggaaacacttagagaatatgatgaaatcaaatatgaattttacgaagggattgctaaggtaacaataaatcgccctgaagtacgcaatgcgtttacacctaaaacagttgctgaaatgattgacgcattttcacgtgcacgtgatgatcaaaacgtttcagttatcgtattaactggtgaaggtgatttagcattctgttctggtggtgaccagaagaaacgtggacatggtggttatgtaggtgaagaccaaatccctcgcttaaatgtattagatttacagcgtttaattcgtattattccaaaaccggttatcgcgatggtaaaaggttatgctgtaggtggcggtaatgtactaaatgttgtttgtgacttaacgattgctgctgataatgctatttttggacaaactggtcctaaagtaggttcatttgatgcgggttatggttcaggatatttagcacgtatcgttggacataagaaagcacgtgaaatttggtacttatgtcgtcaatacaatgcacaagaagctttagatatgggtctagtaaatacagtggtacctttagagaaagttgaagatgaaactgtgcaatggtgtaaagagattatgaaacactcaccaacagcgttacgattccttaaagcagctatgaatgctgacacagatggtttagctggtttacaacaaatggctggggatgcaacattgctttattacacaactgatgaagcgaaagaaggccgtgatgcgtttaaagaaaaacgtgatcctgacttcgatcaattccctaaattcccataagttattttgaatatgatattaagtcacttgcgtcgtttattagcgacgataggtggcttttttattttataagaatttaaaagggcattttaattaattatcataaagataagatagtttgagaaaaattaatagagaaagaataaatgttaaagattattattacaatgaaaaaacgagctggtgagaaattgaattctcgccaacccgctttatgaagtgaaatcatttaaattagttatactaagcgctcataaacgattggtcgcgaagtgccaataccttgtttggatgacgtttgcatgaggatatgctgtgtatcatcataatcaagaatataaatgatttcttcattatcaatagatgaaaatttaatgcgttgatgtgccgtatctataaaaagaatatgatattgattgtgacttgtatcatcgccatgacgtatacaaattgatttttgtaattgatgattactccaattaccaatgaataaattgatattggtttgttctagatgtgtgagtttggttgtgtcgtaaactaaatttataaattgtagttgatacatagttttacctgcctttaatcaatatctatattactttttagtaacctatcattgaaccataccagttataatcacgattgaatgataaatgtaataggcttgaatctgcatcttggattgataattctgtatcccaaggattccagtaaataagtttttcttggtcattaattttagcattaccaacaactgctagcgcatgtcctaaatgtgggtcattagggttttgagatacactttgtgcaaggatcataattcctacattatcttttgtaagttgatcaacttgttcatatgatggtacgccttcttgataatgaatatctctgccttgtgatttaccgtattcaatcatttgattagggaatgttgcacaattaggaaggtcttgctcacttacttcagggtataatgtacgcataatatcatgtgcattataagtgtctgtatttttagttgcatttaataatgctgccatactgaatcctgcacaccatgagttatcgaattgttgttctctaattttgaagttttttaatgtattttcatattgaacttgatcttcttgtatcgcttcgttttcttcaactttagtaggtgttactgtattttttaactcttgtttcaattttgctgaaactgttttagcactttctttttcttttacattaccaggtagaggcgtagcttttactaatctaactttgccatcttcttcaaaataaaaccctttttcatcagtaagaacagtgatatttgaatttttatctttaatttggtctaaatctttagcgatgaagtttgaaattttaacactgtaattcatgtcttcttttgatttgtttaaatcatctttatttttaggactaagtgttaaagtataaacaattttaccgtcttttataactggataatagtaactattatcttcttcaccattaaatttataaattttaaaagcttcgccaagttcatatttaccagtttttgcattactttgtttatctaatgctttagcataaccagcaaattgttgttgtgctagatcttttactttttgaggtactttgtcactcttaacattaatttctagctgtttagagtgtgaatcggctttggctttattgttattagcaaatgcgcctagtgataaaataagcattgaaaccattatgatgcttataatattgaatactctagatttacatgaactattcatataataccctccatttaaatcaaaatattttacgttgctaagactttgcttctattttatctagacgaacttaattgttaattaagctgcatctggattgtctgaattattgttatcgccattgtctggattatcagggttgttagggttgtcagggttatttggttcatctgggttgttagggttatcaggattgttagggttatcaggattatctgggttattaggttggtcatcgttggcaaaatggatatcttcaatattttgttttaagaagttgcgtacattttcattaataaataccgcaccattaaattcatttggtacaccgccccaatgaattccgatcacttcatttttttcattaaatacaggtgaacctgaattaccaccagttgtacttaaatcatattgcatagcttcgcctttgaggtaagtgatttttcctttactttcccacattgttgctacaggtttatcaccaggatatcctgttacagtaatattttggttaacttgtgtttcagcattattactcattgttgctggtttaactacttcaccaatatgtttgttttgctcattaggggagaatttaactattgctaaatcaccttcgcctgaatatttagtgatttgttcagcagtgaaaccaccatttggataattgtcttggttaattgcagaagggaatgcttttaaagcatgaggatcaccgtgcgtagcatctacgacgtgtttatttgttaaaagagtatctttacctacaactacaccggaagcaataaatgtaccagtaggtgcttcaacttgaatataagttacgggtgcataatgaccattcgttgtatctgtgatttggtgacgatcgttatttggtaatataacatttgcgtgttcacgttgttctaatggtttaaggttaccgcctttttgaatcttaggtgtttgctgtttgcttgactgcgtttgttgtggatgattgtccatagcctttgaagataacgcgtttgctgctggagaactcacaagtgtcgctgttgtcaaagttgcaacgaataaagaactaacttttaaaaatttacctttcatctaaaaacctccaaaaaatttatttacaagttaaatataacactaaaaatttttaagtcaataagaatatataaataaattaaaaagtttttgtaaagattagagtttacaaaaacattaagggaattaaaattgaattgtattatactttattcaattgagttaaattgataagatcgtcaattgtttgcatttatctaaaagaataaataagaaaggaattgagagcgaatggaaagtatttgtttataataataaatagtaacttttgaataataattgtttggccaaaggtagattaatatgaatggtgatatattatttgagtgcttaagtttcgaagaacaattataagttagcatattaaaaccttttgatagaatcattttgagtgaggtgtttaaaggagaggaatataactcggtagtatttacagtctctatagagtattatttaaaacttatagaatataaaaaactgaacgtactatgaatttagttcacgacgtccagttcaacatatcatttttatttagtatttaaatatttagcaagtctcttcataccttcttttaaaacatccatttcataagcataggaaatccttacaaatcctttaccgaattctgtaaaggatgagcctggaacgattgctaaatgtgttgattcaagtaaatcgacacaaaattcgaaatcgtcatcggtgatatgtttaatacttgggaaaatataaaacgcgccttcaggttgagcggtaatctcaaaacctaatttagttaattcagatactaaataatttcttcgttctacataagcttcgttcatatatttaggagcttctaatccttcgttaagtgctgttatacatgctatttgagctggaacattggcacaaatacaattataggcgtgcataaatgttaatttatcaatcaaatattgaggtcctaatagaaaaccaattcttattccggttgctgagtgtgatttacttaaaccaccaattaatattaattgatcacgaatgtcttcaaattcagcgaaggatacatgtttaccactaaatgtattttcagcataaatctcatcgctaataataaataacggatatttttttaatacatttacgatatttaaaacttcatttctttttaaaactacgccagttggattagtcggataatttaacaagacagcttttgtctttggagaaatatgactttctaatgcatcaggtgtaattttaaattgtgttgctgttgtatcaatataaattggtttaccacctagtacttcgatgagtggtatgtagcctgcataaattggtcccggtattataatttcatctccaggctctatgatagaacgtaacgttgtgtctattgcttcacttgctccatttgtcacaataatttcttcaggatcataggaaaaatgataacgatttttgaagtattgactaattgcttcgcgagtttctaataaccctttattgtgagagtatgatgtcttgtcattgttaatagcatcaatatatgcctttttcacaacatcaggcatcgggaagtctggttggccaatagttaaattaacacaatcatccaaattattcatacgatttgaaaattggcgaatacttggtgctcttaaatatttagaattagaatttaaagaaagtttcatttgtgacacctcaaatataaatcaaatattgtctaaaaatttagaaattaataatatcataacatacttttaaagcaaaaaagggtaaattacttaagctttatttgaaaaacgaaaaatgtctaaatacactgtagtaactacttttcaaaatgaataaagtggttacagttaatgtacttagacagtataaaattatgaatctttaaactgtgatggtctttgtaaattaattattggatttgtccatttacaaacaaagtttgtagataatacatatacgatgattacagatatacttattaaataaagataagtcattaatgatataggattatcgaatgggtaccattcaaatcctctaacaatgccaataattaaaccatgtaataaatatacgtatagcgtacgactaccaatataagtatataattttttctttgttgacattaaatttagaaacgcagtcattgcgattaatataattccatataatataagtcgtttaaaaggactgaatatactctgtccttcattttcaagtgaagtatatggtgaacttcccaataaccaatctgcattgataggatgaatcacgtaaacgataaaaaacaaaataaaggtaatgatagatactggtattagttttttatttttaaaaatagccgtatgttttttggtgaaaatgtaacctagataaaatattgggaaaaatacgattgtccttgaaatgcttaagtagctatcgatgttatctgaaaaacctgctccaatagatataataattgaaactgatagcactttatatggattaaatcttctaactattactaaaatgacatgaaagaaaaatagcgtgatcaaaaaccataacgcaaatactgggttaaaaggatcaagttgtaattcgtcacttttacctgttaagaaataataaattgaaaagaatgcaaaaaatatcatataaggtactatcaaacgttttgaaattttttctaaatagtatggtttatcaatatttttcgcgaaataaccagatataaacaaaaatgttggcatatggaaactataaataactaggtataatgctgataaatatttatcgccactagtgtagggttgtaacatatgtccaaatacgactaataatattaaaattgctcttgcgttgtcaaaaaaataatctctctcttttaatgaagtcatattttatctcctttatgtccataagactcttactaatttattatattttgtattagttatgcaacaaatttgtctattgtgtcgaatagtattgtaaaaattataaaaaaagcatataatattataaataatatgtagtggagtagaacaacatgtataaacaacttgaaaaacttattacactgactaacaatgacttaaacttagtgaatagaagatttggacaacgcacggatatcaaatctgaacagctagaacttctccgtattttatttaattacgatcgcttatcacagtatgatttgacgatgaagattagcagggaacaatctatagtttcaaggtggattaagaaattagttttgaaagggtacatcacaagtcaacaatctagcgaagatttaagatgtaaagaattaattttgactgatcaagcacgtacattaatttcacaaataaataatgcacgttgcgaattgattgaagcaagatgtcaatgtttatcggaagtcgaattagacaatttaaatcaattacttgataagttaaatcaacgacgcatatcgttgtaacacgacaatagcaaacacataatttagtgtcgttgtgcacacaacaaaaattgaatcatgaattacaagcaaaagtagcggtgattgttaaaattgatggtaaacaatcaccgctatttttgcttgtgtatgtataaaaaagggatcaaaggtcatcccccatgattgatagtgggggatgacttttgatcctatgttcatgttgcttatttatattgtgggatgtcgaagtatttgccgacttcgccaattttatcatagtagcctttgatgattttagcattgatgttagcccaatctacatctgtagcatattggtgtgttcctggatgtgcaggattccatctcattttgtaaagtgtattttgaccagcttttacatatgagttgccgatgaatttagcaccaccaacgattgcttttgatactgtgtcccaaccagcttgtttagcatatttaataccttcacgtaaaggatcgttatcatatgcagcaataccaaatacgttatggtatttcgtgtttgagttagttacaactttgttgttcactacatctgcacctttcgctaattgagaagtaccgttacctgtttctaatagggcatgtgagataagataaacttcattaatgccatacatttgagcagctttgttaaatgcagcaccttggttttctaatacacctttaccttttaagaattgattaattttatcaatagaaatattttgtggttggtctaagcgtaagaattgatattttaatgctggatcttgagctaaacgcttcgtatccattgcatgcttaacatcattaaagttagcatctgtccacttacctggtacacgttgtacttgtggtttatattgtaaaccagcttgtatttgagcaacttggtttaatgtcatacctgtttgattatacttaattaattctttagctaaatcagttgatttaatccatgctaatttaccgttagataatttaccatagtaccaagtttgtccattaatgacttgttctttaacaactgcgaatggttgttcattaaatgcttttaatgagtatttagctgtatcagaatttggtgttacatagtaataaccattaccatttttaattacataagtgtagttataatctttggcagctgatgtagttggtttcacagcggttggtgcagttaaatcttttgcatttacccaaccagtgcggttattaatagtaccgtataaataaacatctttgcctacagatacttgtttcgttgcattaaatgtaccttgagcaatgttattgcctgttaaaatgacttggtttttagtaccccaaggaaccattgataagccgttatttgatttattaacagtatatttttgagtcgttttaacttctttgcctaagttttgaacatttaagtcttttacattgaaccaacctaatgggatgttatggcttgtattgtttaataatacatacgtttcattaccatgagcacgctcttttgttacatagaacgtacggtctgcatatttcgcaccgtttttcgctgttttttcataaacagaagcacgaataccagtgttgtttggtttaacttgagcaatcttgctaactgtttgagtcgtttgtggtttagtaacagtataagcttttacagctgtttttggttgtgctactgcttttttaggtgcagcaggtacagctaaatatgctttacttacccaaccagatttaccatttacagttccaaataaatagatagatttatcaatttgttgttgcttagtcgctttaaaagtttggttacctgtaccagaaactgcaccagcttcttgtttataagtgccccaaggtactgaatataatttagtgcctggttttactgtatatgtttgcattacatttacaggtgattttgcattgttataaataacgtcaccttgtttaacccaaccaattaaagttggactattgtaatctttaactaagtagaatttgtttccacctaaacttgcttcttttgttacagcaaatgttttttgaacttctttcgttggcttaccagttttgtcataaactgtagtgaataagccattgtttttagcattaatttgagcaacaccgtttaatgatgaaactgttaatttattatttgttgtaggtgttgatggcttaggtgttggtgtaggcgtaggtttagcagtatcaactaaatatgctttacttacccaaccagatttaccattcacagagccatataaataaattgatttatcaatttgttgttgctttgaagccttaaatgtttggtttccagagccagacacactaccagcaacttgtttagatgtaccccaaggtactgtataaagtttcgtaccaggtttgattgaatatgattgatttacatttacaggtgatttagctgtgttgtaaaccacatcgccttctttaacccaaccaaatttattaccagaattgtaatcttgaacaagatagaatttttgattacctaatgtagctgttttagatacagcaaatgttttttgaacttcattagttgctttaccagttttgtcgtatacagtagtatataaaccactatttgttggtttgatttgtgcgacaccattgtttgcagcaactgttaatttaccagttgatggtttcgacggtgttgttggttttgatggtgtagtaggggtagttgtagattgcgtaccccatggcgccactttacccatttttattaaatatttttcattaattaagtcatataattgatcataactataattatgacttcttaaatatccatgtggatcggcatggtcagtaccacctaaatatttacttacagcgtagtgagtccatactgtaccatttccatcatactcagcactgtctggttttaaaccataatattgtaattgtgtagctgcatagtcagcatagttattcattgaacgtgcaaatgaagcatagtcgtgtgtgtgtacgatttcaacattgatgaatctagggttaccgactgcaccgacaccccaagataagtaatccgttggtgctgtttcgattatacgatccccatcaacaaatgcatgtacgaatgcgttttgatagttatttttcatataactaatttcaccatttatcgtcgaacgatcattagctgtatcatgaactacgataccttcaggacgacctacgccgttacggtatgcgtatttagggaagtaagatgtataatcttcttcaattttaggtgcttttaagttatttttacgaatgtaatcgttaattgaagagtttacttgtggtttatattttggcaaactcgtttttggtgttgcagcaactgatcttggttgtgctgaagcgctaaaagtagttactttaggtgtcgcttcagttttagctttaggtgctgatgtagttgcagctttaggtgctgcggttttatattgcgtttcaagagctgcaggtttagcagctgatttaattaattctggattaatttgattttctgaattatcatcttcatcatcaactaaactataaccagcatttgtaacattagtgttagttttaggtgctgtagtgcttgttgactttgcaacaggctgcgtattatttgtagtcgctgattgattagcacgagtgtcaccatttacttgtgcagtatcaactttttgacttacttgagcattgcctgttttgttatttgctgtttttggttggacaatagcagggtcttgatatacttgagtgccagaaatgttttgcgttggattttttacctcagcttttgcttgttcagtagttgctttaactttattactatctaaaacgtttttattagtagtttgatcttgtgtcgtctcagctgcttgaacttgatgtgcagtgactgctgaacctacaagcgttaatgcaaccattgatggtagtttgtaattgaattttttcgccattctatttattactcctaacatttattaattattactaacattatagtacctgttttatatacctgtgcgtatttaaccaatttgtaatatactcttaatttacattttcactgtaaaaaaatgaaaaaaattttgaatctcaatggtgacgtgacaaatcaaatagaattgatgtcaatttaagaattggtttattacaaatgtttctaaaatagatacaactttttttaattaagcgaggttaacttttttgtcatttcaatatgctcgatgccttcctcaagaaatatattacctctcattttaaagtttaaactttcataaaatgggatagcatgacattgggcattcatagtagctacgtaaaaaccttcatctttagctaatgattctacagcttgcataagcattctacccattccttgtccacgatgtgatttcatcacagctactcgttctattttgacagttgtttcattaatagggcgtattcgagcagtggcaactggctgtccattatcatatccaatgaggtgaatagattcagattcatattcatcaatttcactttcctcagggacgccttgttcttctacaaacactttctttcttatatagaagcaatcttctaacatcttttgattgtttacttttgaaaacataaaattcctccacatcctaacaaaatcatttacatttaatttactaataataacatagaataacgattgttattttcctcaaaaataattagacataaaaaagctataaagatgattgttgtgaatcatctttatagctaattaattattaatgttatagtgcttcttttctaataattgctgtatattgccaaaagattcgcatttgagcaatattccaattattcattcccattgtaaatcctgaaggcttaaatatattcacatcagttacttctaaagctgctgcaactaaatattgtaatggaatgctaagtgatttcattgtttcggtaatgccattttcatcatatacccatgaaaatggtaactctgattcgaaaacatcaacactattgaaaatttcaggtagggctaaaatataacatgcaccatctacaataggattgtcgatactatttttgtaataaattaggagtgcttcatagttttctcgatgctcatgattgacgtaaaaaaattcacttctaaaatgagccatatcttggctatgaatgatttgttgttctaacatattaaacatgccatttatatttgcaatcttttcgtatgtttttctactcatgtatgatgctcctttcataaatagtaaatgttaatcgtcatataatattaatttacaacaccattttggttatttgaagcttgtggcgcttgttgtgtgccaccttgattttgatttgagttttgatctgtagcaggttgttgttgattgctggaatcactgttattagttgaatcactgttctcgttagatgtcttatctttatctgtcgtatcattttgttcttttctcaataaactattatctaaaggcgttaatggtattaatgaaccataatgattaatgacacgttgatctaagaaatcatttttatcattaataggtgataattctaagtctttacgaagtaagtttgcatatttttgaatgctttcaacacttggatgataatagtaaataccatttaacatatcatctttaccttttaattgcgcagttttaatttcaacatcatttgttaagtacatttttgctaaagctttaatttcagagttagttaaattatgctttgcatttttacctacaatttgaatcacgttatcaagtttatcaatagaatcaacttcctgtgctttttggaataaaatcttaattaattccatttgacgttgtccacgttttaagtctgaatcatgatgtctagttctagcaactgctaaagcctcatcaccatttaatttttggtacccttttttaattttaatcttaccagtatcatctgtgttaggttcatttaagtcgtatggcacatcatagtatatgccaccaagctcatttacagcctcgacaaatgctttcatattgactctcacataataatcaacaggtacattcatggtagcttctaccgaatccattgcggcaattggaccaccatatgcatgtgcatgggtaatcttatcgtaatagccaactttaggaatgtagctgatagtatcacgtggaatactaagcattctaatttgatgttttgattgattaaaagtagttaaaatcatagcgtctgatctagagtgttcagcatcctgtcctttttttcttcttccatcgttatcatcgatacctaagaaaagaatagagataggttgttcttcgggattgactttattatctcttaagttggattgacgattagcatttttgctgtcttgagaagattcgaatgcatcttgggacgttttaaaaagtaacgtagcgaagactattggaacaacaatgagaaccaatgctagaaggatcaaaaagtattttaaaaatttattcatgattgatgctcctatattaaatttttgttaaatcataatcataattttaaaatataattagttgaacgatatttatacaacttcattactaatacattatagccttaaattgtagtactttatagtaaaaaatacaaatgttatgtcaaagttccttgtaatttgaatgttttgttaaaatcaaaaagcatttttaaaaatataatgcgactttagtatgatgtcttaaaaaatttaaaggcgtaatataaattcgagtgatttatacaaagtgataaggtataattaattttgttgtatagataacatattagaaaaacttattactatgtagcgtaaagcataaatgaatgataagttaatttttgtaagttgtattattaggcatctaggttcaaatttttaacgatttaaatatataaaatgaatacattgtgaggcaattatcaaatgaaatttaataaagtaaaactagttatacatgcgtgtgtactattatttatcattatttctatagcgttaatttttcatcgattacagacgaagacacattctatagacccaatacataaggaaacaaaattatcagacaatgaaaaatatttagtggatcgtaataaggaaaaggttgcgccgtctaaactaaaagaggtatataatagcaaggatcctaaatataagaaaattgacaagtatttacaaagttcattatttaacggttcagtagctatatatgaaaatggcaaattgaaaatgagtaaaggttatggatatcaagattttgaaaaaggtattaaaaacacaccgaatacgatgtttttaataggttcagctcaaaaattttcaacagggttactgttaaaacagttagaagaagaacataaaataaatatcaatgatccagtaagtaaataccttccatggtttaaaacatctaagcctatcccattgaaagatttaatgttgcatcaaagtggattatataaatataaatcctcaaaagattataaaaatttagatcaagcagttaaagcgattcaaaaacgtggtattgatcctaagaaatacaaaaagcatatgtataacgatgggaattatttagtacttgcgaaagtaattgaagaagttacaggtaaatcttatgctgagaattattatacaaaaataggagatcctttaaaacttcagcacacagcattttatgatgaacaaccttttaaaaaatatctagcaaaaggttatgcttataatagtacaggactttcattcttaagacctaatattttggaccaatactatggtgcaggtaatttatatatgacaccaacagatatgggtaaattaattactcaaatacaacaatataaattattcagtcctaaaataaccaatccattattacatgagtttggtacgaaaaagtatccagatgaatatcgatatggtttctatgctaagccaacattgaatagacttaacgggggattctttggacaagtctttactgtttactataatgataagtatgtagttgtacttgcattaaatgtaaaaggaaacaatgaagttcgaatcaaacatatttataatgatattttaaaacaaaataaaccttacaatacgaagggtgttattgttcaataattaatatagaagatataacatgtatatggcattaaggcatcgaccttatctgaccagtatacgagttatatcttcttttttatagtggtaaaaagtttaaagtataaggttgaagaaggatgagtttaaaaatatgtgttaactgataaaaggggaaatcatttggtgagttggcatcagactaaaatgaatgaagacgaatacgttggtccatgcgtggtgtgaatgttttctaaatctaactggaaatgataatttaataatgtacacttttgattgtttaaacatgtacaatttttaaaaacctagggataattttattgacgtgaacaacattgagattatctttagacataaatatggattttgaagttactatatttattagttgtggttgttaatgtattaattgaattgattataatgattgtcttataagatatagaaggggacttaaccatttaaaaattgaaggaaaataaaaaccagctaacaaaagtgttagctggttaaactttacattattaaaatgttgtttataagtgtgaagagtgaccgccttgcataacccaatatgttccgacaacgaaacaaagtgtaattacaagagcaaagataactttgaatgtttgtaaacgtccatctttaccttcagttaaatgcatgaacattaataattgaagtcctgcttggacgaatgcaaagccaaagataattgtcaacttcgcgtggaatgttaatgacgtgtatagtgttacgtaaactgctaaaagcgttaatacgatagatgcgataaatcctacagtatgtttcattattgtactcatccgctatacaccatccctatcatatatacggcagtaaagatgaaaacccaaacaacatctaagaagtgccagtataaacttactataaataattttggcgcattatatttgtctaatccgcgtcgttggatttggattaataaacaaatggcccaaacgatacctagcgatacgtgacaaccatgcgttcctaataggataaagaaactagaccagtaagaaccaattgttgggttaacgccttctgatgcatagtgtgcgaattcataaatttcgaatccaacaaagactaaacctaaaagtaacgtaatgatcatccaaaacatcattaacttttgtttttcttggcgcatgtagtaaatagcaataccacatgtgtaagaactgaataataatgcaaacgtcattattaaaacaagaggcaattcaaataactcagtagtcattttacctgcataatcgccaccatgttgcaaagttaatagtgtcgcaaatagggtaccgaataacgcaaattcggctgtaatgaaaatccaaaagccaagcttatttaattcgccttcatgtgtgcgtgaatcaatagtgtttgtatcatgactcatgacttacagcctccctttctttaatacgcgcttctcttaatctagcttcagtttctgcaacttcagcagcagggatatgatatccgtgatcgatttggaaactgcgataaatcatagtaccaaaaataccgaataaacaaattaatgctggaattacagtttcgaaaattaagaagaaaccgccgatagtcataaagataccaatccagaatccaacaggagtattgtttggcatatgaatgtctttgtaattatggttgtctaagtaatgacgaccatgttctttcatatcaacaaatgtgtcgtagtcattccaatctggtgtaatggcaaagttgtatttaggtggaattgctgatgcagtagtccactctagagtacgaccaaggccatcccagttatctccagttgcttcacgtggagatttgaagtgactgtatacgatactaacaacaaggaataagaatccgattgccattaataatgcaccgatagttgaaattaagtttaataagaaccaaccatctgatggcatataagtgtataaacgacgtggcataccatctaatccaagaatgaattgtggtaagaaacaaacgttaaatccgatcatgaagaaccagaagcaccatttgtttaatgtttcgtttaatttgtaacccatcatctttggataccagaagattaaaccagctaagcaggcaaatacaacaccagtaaccaatgtatagtggaagtgagctactaagaagtacgtattgtgatattgatagtcagctgatgccattgctaacattacacccgtaacaccacctaaaaggaagttagggataaatgctaatgagaatagcattggtgactcaaatgtaatacgtcctttatataatgttaataaccagttaaacaatttcacaccagttggaataccaatcagcattgttgaaattgagaagaatgagttgattaacgcaccattacccattgtgaagaaatggtgaacccaaactaagaaactaaggaacgcgatgccggcagttgcccataccatactttgatgtccgaataaacgcttacgagcgaatgtcgggataatttctgagtaaataccaaatgctggaaggataacgatataaacttcagggtgcccccatacccagaagaagttagcccaaagcattggcataccgccatgtgcaactgtgaagaatgctgtgtcaaatattctatcagttgtcattaatgctaacgctactgttaaaggagggaaagcaagaataacaattaatgtagtaataaatgttgttactgtaaacattggcatttgcataaacttcatagttggtgttttacatcttaaaattgttacaaagaagttgatacctgtagctaaggtaccaagccctgaaatttgtatagctattaagtaatagttaacacccggaccaggactgaattcacctgctagtggcgcatagtttgtccaaccagctgctggtgaaccaccaataataaatgacaggttgaataaaatcatacctgcaaagaatagccagaaacttacgttgtttaatactgggaatgcaacatcacgtgctccaatttgtaatggaacaacgatattccataaaccaaagataaatggcattgccatgaagataatcatgattacaccatgtgtactaaaaatttcgttatagtggttagattctaaaaatttgttatcaggtactgttaattgcgcacgaataagtaacgcatcaataccaccacggacgaacattaatacggcacagattaaatacataataccgattttcttatggtctacagatgtgaaccattctttgtaaagatatttccataatttaaagtaagtaattactgcgattaaaccaataactaagaatggggcaccaatttgtgccattgtaatcatccagttacctttaactagtaattgatcccatggaaaattcattaatgtccacctccatgatcatcattgtcttgatcttgcgcatcttttgaaattttcttcatttctttcgcatttttcgattcatctttcttgaactcattgttatatggttcgtcatttccaagaatcatcaacttcataccatgtcgtttatagttcgcatttgtaatttgagctttacgagcaggtattaatggtttgtctgatacatctttaaacatattttcttcactagtgaagtttggatcttttaattcgaaattgaaacgtttatatgcatagaagatgtattctggatcggctgctggatcaacaaacgccatatgtgtaccattaaattctaaagctttattaggtgtgcttggtaataattgtttatcaaatgtatcttgatctaacgttttcttacctttaacttctttcacccatttgtcgtagtctttttgactaacggcatttactttaaatgtttgacgtgagaatccttcaccattgaagttagagttacgacctctgaacgtaccagtttgagatgcttctaacgtccaattcattgtcatgccagtcatggcatatttttgaccacctaattgtggaatccagaaacttgtcattgtatccatagcttgaagcttaaatacaacaggacgatctttagggattgttaatgtattaacagtctctatatgttcatctggataagcaaagaaccatttgtatcctgcacttactgcatatacaaccattggatctttctcactcttcggtggtttttcgtaatcgtataaagttttaactgtaggaatagctaaagcagcaacgattatgataggtattacaaaccatattgtttcaatgatggcattatggtgcatcttaccagattcggcattcttattataactatacttgtaaataaaaatggcgaacatgccaagtacaacgaaacaaataacaagcatgaagacgattgaataaagaatcaagaacttctgactacttgctactggcccttttgcgttgaaaatttctatatttgaacaaccactaagtaaaattagtgtgccaaataatagaagcaaagacttaaattttgacacttttttgacctcctaatactacaaatgtagggcttaacattaattttaagttattacacaatatttacaagggcttatgggaaaaaaattaataaaattgtatcaaaaatgttgataaatcaaggtgtgacgtgggttcacacatttgttaaaattatgtgtacattttgtgactaatagcgtttttgaaaaaattgcttcatatttaaaaggaaagttgagaatagctttcaattaaaggttaattgaatgaaaataaaaaaagtttgaaattgtctaataaattgaaaatgatggctagttgattgaaaggaagcgcaaacattttaataaggaatttgccaaaagtaatttatcgttaaacaatgaaaagtggaaatttgtttgttcaaaatcaaaacatttttttaaaaagagcagttaagttttaataatttgataggtagtcctttggtatacagaaaaaatacaatatttgggttaaagttgcagatgaagttagaataacaaataaaatggtagcaaaacatgttcgtttgctaccattttatttgcagtatagtgatgagggctatttaacctcaatatacctagtggaaattttaattgcaccatctgaatcagtgacatgatatttaatttgatatttaccagatttagatgtatcaatttggccatcgactttaattttatcggttaaatctccatcttctttatcaaatgcacttatgccgtttagaaggttataatcttgacctttcttaataacgatatcattagcgcctttaatttgtggtgtagtattcgtcgttgcatctgcatttaaatttggtgttactagtgtagcagaaacaccgagggctgataatgactgtaatagtttattcataatgtaacctccgaatgataagtcatttctgagttagctttactataccttaatttatattatttacacatcatactatagtcctaatcttaccctataaagaatgaaatttaaatataaatttataaataatgaggaaataattattattttgaaaatctgccacaattgtaaaattaataatttagggataatttgaaatcaaatataactttattcgacagtttgaacttaaatttttgtgtatcaaaacaataagaaaagggaggcgaaaatgataaagaaccactaatgattaactatgtagtagtactttatcatagtcacagcttctgtgttggggcccatccccaacttgcacattattgtaagctgacttttcgtcagcttctttgttggggccctgactagaattgaaaacttgttacaagcttattttcattcaattaactactgtctatataaaattgttgagccaagtacaaagtgaaatgctcccttcaaagccttcatttattcaatgtctactttgaagggagcatttgatcgattaatgtcccagatttttcttgttattcattgcaattgcaaaataatatttaatgtgggttaaaagactttattaaaactcagttattagggagtgggacagaaatgatattttcgtaaaatttatttcgtcgtcccaccccggcaaggttgactagaattgaaaaaagcttgttacaagcgaattttcgttcagtcaactactgccattataactttgtagagcatagaacattgatttatgtctcaggctctttacgaatcaatacctcgacgcattttttctgcaagcaaagtattatttaataccatagtaattgttaatggaccaacgccaccaggaactggtgtaatagctccagcaatttctttaaccgcatcataatcaacgtcaccttttaatttgccattttcatctggcgtattgccaacatcgataattactgctccttctttgaccacatcttttgttactaaaccaggcttaccaactgcactgacaatgacatcagcatcttttaaatatgatgccatatcttttgaacgagaatgtaagattgttactgatgcatttttttgaagtagtaacttagaaactggttgtccgacaatatgacttcgtccaattacaactgcatttttaccttctaaatcaatatcagcatgttttaatatttccatgatgccgagcggtgtgcaaggtacaaaagtttgttcatcgatatataatttccctatatttattggatgaaaaccgtccacatctttttcaggattgattgcttctaatattttctgttcgctaacttgttttggtaatggtacttgtaccaaaataccacttacagaatcatcattatttagtctatttagttcgtttaatacttcttcttcagtagctgtttcttccaaatgtacgatttctgaaatcataccaattttttcagctgctttcttttttgatctaacataactttgactagcgccatcattaccaactaatataacggataatttaggtgtaaaacccttttcttttagcgcttcaacttgatcttgtaacccctgtctgtagtctttggcaatttgtttaccatctaaaattttagcaaccataaaaacttctcctcctattgtcaatatcctaactttgttagtttataaaactaatttacatagcaaaagacgtaaattcaaacaaaaaatcaaaataaagttcgatttttgattgaaaaagcagaaattgcttgttatgctatatctataatatacaactaaagtaattcacaattcaaacttttgaaagggtgtacaaagtgaaagtagcagtcattatgggcagttcttccgattggaaaattatgcaagagagttgtaacatgttggattattttgaaattccgtacgaaaaacaagtagtatccgcacatcgtacgccaaaaatgatggttcaatttgcttctgaagcgagagaaagaggtataaacattatcattgcaggcgctggcggtgcggcacatttaccaggtatggttgcatcattaacgacgctaccagttattggagtgccgattgaaacaaaaagtttaaagggtatagattctttattatcaattgttcaaatgccaggaggtattccggttgcaacgactgcaattggtgcagcaggtgctaaaaacgcaggtatacttgcagcaagaatgttaagtattcaaaatccttctttagttgaaaaactaaatcagtatgaatcttcgttaattcaaaaagtggaggacatgcaaaatgaacttcaataaattaaagtttggtgcgactattggcattattggtggtggtcagcttggaaagatgatggcacaatcagctcaaaaaatgggttataaagtggttgtattggatccttctgaagattgtccatgtagatacgttgcacacgaatttatacaagccaagtatgacgatgaaaaggcactcaatcaattaggacaaaaatgtgatgtgattacttatgaatttgaaaacatttcagcccaacaattaaaactattatgtgaaaagtacaatattccgcaaggttaccaagctatacagttattacaagatcgcttaactgaaaaagaaacattaaaaagtgctggtaccaaagttgtcccgttcatttcagtaaaagaatctacagatattgacaaagcaattgaaacattaggatatccttttattgtaaaaactagatttggtggctacgatggcaaaggtcaagttttaattaacaacgaaaaagacttacaagaaggttttaaattaattgaaactagtgaatgcgtagctgaaaaatatttgaatatcaagaaagaagtatctcttactgttacaagaggaaacaacaatcaaatcacttttttcccattacaagaaaatgagcatagaaatcaaatacttttcaaaacaattgttccagcgagaatagataaaacagctgaggcgaaagagcaagttaataaaattatccaatcgattcatttcattggaacatttacagttgaattttttatagatagtaacaaccaattgtatgtgaacgagatagcaccaaggcctcacaattccggacattattcaattgaagcatgtgattattcacaatttgatactcatattttagcagttaccggacaatcattaccaaattcaattgaattattaaagccagcagtcatgatgaacttactaggtaaagatttagatttattggaaaatgaatttaatgaacatccagagtggcacttacatatttatggtaagtctgagcgtaaagatagcagaaaaatggggcatatgactgtactaacgaatgatgtaaaccaaactgaacaagatatgtacgctaaatttgaggggagtaattaaagcatgacattattatatgaaggaaaagcgaagcgcattttctcaacaaatcaagaaaatgaattaagagttgaatataaagatgaagttactgctggaaacggggctaagaaagacacaatggcaggtaaggggcgattaaataatcaaattacttctattatatttaaatatttacaagaaaatggaatagaaagtcactttattaaacaattatctgaaacagaacaattagttaagcctgtgaaaataattccattagaagtagttgttcgtaatattgctagtggatctattacaaagcgtttaggttttgaaaatggtgaagtttttagagaaccacttgtagaatttttctataaaaatgatgcgttaaatgatccgttgataacggatgaccatgttaaattgctcaatatagcatcagatgaagatattgaaatactaaaatccaaagcattaaagattaataatgtgttgaaacaattaatggatgctatgaatttaaaattagtagattttaaaatcgaatttggaaagactgagactggtcaaattttgttagcggatgaaatatctccagatacatgtcgaatttgggataaagctaccaatgcaaactttgataaagatgtatatagaaataacactggatcactgattgaaacatatcaaatatttttaaacaaattggaggatttaaaataatgaaaacaattgaactacatatcacattacaaccacaagtattagatacgcaaggacaaacgcttactcgagctgtacatgacttaggttatgcacaagtgaatgatattcgtgtaggaaaagtattatatatgacagtggatgaggttagtgatgaaaaggtacacaacattattacaactctaagtgaaaaattgtttgcaaatacagtgattgaagaatatagctataaagtgttagatgatgaaaaggagaatgcataaaatgaaatttgcggttcttgtttttccaggttcgaattgtgatagagacatgtttaatgctgctattaaaagtggtgttgaagcggaatatgtagattatagagaaacatcactaagtggatttgatggcgtacttattcctggtggattttcattcggggattacttaagatctggggcaatggctagtgtagcgccgattatttcggaagttaaacgtcttgcagctgaaggtaagccagtattaggtgtttgtaatgggtttcaaattttaactgaaataggcttattacctggtgcattattgcataacgattcacatttatttattagtagaaatgaagagttagaaatagtgaataatcaaacggcatttacaaatctttatgaacaaggtgaaaaagttatatatcctgtagctcacggtgaaggtcattattattgtactgatgaaatatatcaacaattaaaagctaacaatcaaattattctgaaatatgtgaataatccgaacggttcatatgatgatattgcaggaattgttaacgaaaaaggcaatgtatgtggcatgatgccacatcctgaaagagctttagaaacgttgttaggtactgatagtggtgtgaaattatttgaagcgatggtaaaaagttggagggaacaacatgtctaaatttatcgaaccaagcgttgaagaaattaaacttgaaaaagtatatcaagatatgggattaagtgatcaagaatatgaaaaagtttgcgatattttaggcagacaacctaactttacagaaacaggtatcttttctgttatgtggagtgaacattgctcttataaacattctaaaccgtttttaaagcaatttcctacgtcaggtgaccatgtgcttatggggcctggtgaaggtgcaggggtagtcgatataggtgataatcaagccgtagtatttaaagtagagtctcacaatcatccatcagcaattgaaccatatcaaggggctgctacaggcgttggtggaatcattcgtgacattgtctctattggggctagacctattaatttgttaaacagtcttagatttggagaattagataataaacaaaaccaaagattacttaaaggtgttgtaaagggtatcggaggttatggtaactgcattggtattccaacaactgctggtgaaatcgaatttgatgaacgttatgatggcaatccacttgttaatgcaatgtgtgttggtgttatcaatcacgacatgattcaaaaaggcacagcaaaaggtgtaggtaattcggtcatttatgttggtttgaaaactggtcgagatggtattcatggtgctacttttgcatctgaagaattgacggaagaaagcgaaagtaaacgaccttctgtacaaatcggtgatccatttgtaggtaaaaaattaatggaagcaacacttgaagcaattacatttgatgaattagttggtattcaagatatgggtgctgctggtttaacatcttcatcgtctgaaatggcggcaaaaggtggtagtgggttacatttgagattagaacaagtgccaacacgtgagccaggtatttctccttatgaaatgatgctttcagaaactcaagaacgtatgttactagttgttgaaaaaggtactgaacaaaaattcttagatttatttgataagcacgaattggatagtgctgttataggtgaagttacagatacaaatcgttttgttttaacatatgatgacgaagtttatgctgacattccagttgaaccactagctgatgaagcacctgtatatattttagaaggagaagaaaaagattataatacttctaaaaatgattatacacacatcgatgttaaagatactttctttaaattacttaagcatccgactatagcatctaaacactatttatatgatcaatacgaccaacaagttggtgccaatacgataattaagccaggacttcaagcatcggtagtacgtgtggaaggcacaaataaggcaattgcttcaacaattgatggtgaagcgcgttatgtatataacaatccatatgaaggtggaaagatggtagtagctgaagcttatcgaaatttaattgccgtgggtgcaacaccattagcaatgacagattgtttaaattatggttctcctgaaaagaaagaaatctatcaacagttgatagattcaacgaaaggtatggcagaagcatgcgacattcttaagacaccagtagtttctggtaatgtatctttatataacgaaacgaaaggtacttctattttcccaacaccagttgttggaatggtaggtttgattgaaaatgtaaattatttaaatgattttgaacctcaagttggagataaattatatttaatcggtgatactaaggacgactttggtggtagtcaacttgaaaagttaatttatggcaaagttaatcatgaatttgagtcattagatttgagttcagaagttgaaaaaggtgaatcaatcaagaccgctattcgtgaaggactattatcacatgttcaaacagttggtaaaggtggcttactgattaccttagctaaactaagtgcgcattacggtttaggattaaaatcttcaatagatataacaaatgcacaattgtttagtgagacgcaaggccgatatgttgtttctgttaaatcaggtaaaactttaaatattgataatgcaatagaaattggacttttaacagatagtgataatttcaaggtaacaacaccatatacagagattagtgaaaatgtttcagatattaaacaaatatgggaaggggcaattgctcaatgtttaactactcaggattaaacgaagaatgtggcgtgtttggtatttggaatcatcctgaagcagcgcaactaacatatatgggacttcatagtttgcaacatcgtggtcaagaaggtgcaggtatagttgtttctgatcaaaatgaattaaaaggcgagcgaggattaggcttactaactgaagcgattaaagatgatcaaatggaacgattaaaaggatatcaacatgcaattggtcacgtccgttatgctacttcaggtaataaaggtattgaaaatattcaaccgtttctgtatcacttttatgatatgagtgtaggtatttgtcataatggtaacctcattaatgctaaatcattgcgtcagaatttagaaaaacaaggtgctatcttccattcgtcttctgatactgaagtcattatgcatttgatacgtcgaagtaaagctcctacttttgaggaagcgttgaaagaaagtttgcgaaaagttaaaggcggttttacatttgcgattttaactaaagatgcgttatatggcgcagtagatccaaatgctatcagaccacttgttgtaggtaaaatgaaagatgggacatacatccttgcaagtgaaacatgtgcaatagatgtgttaggtgcagaatttgttcaagatattcatgcaggtgaatatgtcgtgattaacgataaaggtattacagttaaatcttatacacatcatacgacaactgcaatttctgcgatggaatatatttattttgctagaccagactcaacaatagctggtaaaaatgtccatgcagtacgtaaagcttctggtaaaaaattagcccaagaaagccctgtaaatgctgatatggtcatcggtgtacccaattcatcgctatcagctgcgagtggttatgctgaagaaataggtttgccatatgaaatgggactagttaaaaatcaatatgttgcaagaacatttattcaaccaactcaagaattacgtgagcaaggtgtgagagtgaagttatctgcggtaaaagatatagtagatgggaaaaatatcattcttgttgatgattccattgttcgcggtacgacaattcgacgcattgtgaaaatgttaaaagattctggtgcaaataaagtgcatgtgcgtatagcatcaccggaatttatgtttccaagtttttacggaatcgatgtttcaactacggcagaattaatttctgcaagcaaatcacctgaagaaattaaagattatattggcgctgattcattagcatatctatctgtagatgggttaattgaatcaattggtttagattatgacgcgccatatagtggcttatgtgtagaaagtttcactggagattatcctgcagggttatatgattatgaagcaaattataaagcgcatttaagtcatcgacaaaagcaatatatttctaaaaacaaacacttttttgatagcgagggaaatttaaatgtctaaagcatatgaacaatctggtgtaaatattcatgctggttatgaagctgtagaaagaatgtctagtcatgttaaacgtacgatgcgtaaagaagttatcggtggtttaggtggattcggtgctacatttgatttatcacaattaaatatgacagcgccagttttagtttctggaacagacggagtaggtacgaaattaaaactagctatcgactatggtaaacatgattcgataggtatcgatgcagtcgcaatgtgtgttaatgatattttaacgacaggtgcagaaccattatattttttagattacattgctacaaacaaagttgttcctgaagttattgaacaaattgttaaaggtattagtgatgcatgtgttgaaacgaatactgcacttatcggtggagagactgctgaaatgggtgaaatgtatcacgaaggcgaatatgatgtagctggatttgctgttggagcagttgaaaaggatgactatgtagatggttcagaagtgaaagagggacaagttgttatagggcttgcgtcaagtggcattcattcaaatggatacagtttagtgcgcaaattaattaatgaatcaggcattgatttggcatcaaacttcgataatcgtccatttatcgatgtctttttagaaccaactaaattatatgtcaaacctgtacttgctttgaaaaaagaagtttctattaaggcaatgaatcatattactggtggaggtttttatgaaaatattccacgtgcattgccagccggatatgctgctagaattgatactacatcatttccaacaccaaaaatatttgattggttacaacaacaaggcaatatagacacaaatgaaatgtataacatttttaatatgggtattggctatacggttatcgttgatgaaaaagatgtatcacgcgctttgaagattttagcagaacaaaatgtggaagcctatcaaattggtcatattgtgaaaaatgagtcaactgcaattgaattgttgggggtataacaatggttaaaattgcgatttttgcatcaggttcaggaagtaactttgaaaatatagttgagcatgttgaatcaggaaaacttgaaaatattgaagttacggcgctatatacggatcatcaaaatgcgttttgtatagatagagcaaaaaagcacgatattcctgtttatattaatgaaccaaaacaatttgattcaaaagcagcgtatgaacaacatttagtaacattattaaatgaagataaggtagagtggattattctagctggctacatgcgtctaattggtccagacttattagcttcatttgaaggtaaaatattgaatatacatccatctctattgccgaaatataaggggattgacgcaataggccaagcatatcatagtggcgatactattactggttcgacagtacattatgttgatagtggtatggatacgggagaaattattgaacagagaaaatgtgatattagaccggacgattcaaaagaacaattagaagagaaagtaaaaaaattggaatatgagttatatccaagtgttattgctaaaattgtaaaataaggagtatgtatgtgatgaagaaagctattttgagcgtatcaaataaaacaggtattgtagagtttgctaaagcgttaacgcaattaaattatgaattatattcaacaggtggtactaaacgtatattagatgaagcaaatgtaccagttcgttctgtttcagacttaacacattttccagaaataatggatggccgtgttaaaacattacatccggctgttcatggtggcattttagctgatcgaaataaaccgcagcatttaaatgaattatcagaacaacatatagatttaattgatatggtagtagttaatttatatccattccaacaaactgttgcaaaccctgatgtgacgatggacgaagcaattgaaaatattgatattggtggtccaacaatgttacgtgctgcagctaaaaactataaacatgtaacaacaattgtacatccggcagattatcaagaagtattgacgcgattaagaaacgattcgttagatgagtcatatagacaatcattaatgattaaagtttttgagcatactgcagaatatgatgaagcgattgtacgtttctttaaaggggataaagaaactttaagatatggagaaaatccacaacaatcagcgtattttgtgagaacttcgaatgctaagcacacgattgcaggcgctaaacaattacatgggaaacaattaagctataacaatattaaagatgcagatgctacactagctttagttaaaaagtttgatacacctgctacagttgcggttaaacacatgaatccatgtggtgttggtatcggtgacacgatagaacaagcatttcaacatgcgtatgaagcggatagtcaatcaatatttggtggaattgttgcattaaaccgagctgtaacacctgagttagcagagcaattgcatagtatctttttggaagtcattattgcaccaaaatttacagatgaagcattagatattttaaaacaaaagaagaatgtaagattattagaaattgatatgactatagacagtaacgaagaagagtttgtttcagtatctggcggatatttagttcaagataaagacaattatgtcgtgccaaaagaagaaatgaaagttgttacagaagtagcacctacagatgaacaatgggaagcaatgttattaggatggaaagttgtaccatcagtaaaaagtaatgcaattattttaagtaataataaacaaactgtaggtataggtgctggacaaatgaatcgtgtcggtgctgctaaaattgcgttagagagagctattgaaatcaatgatcatgtagcgttagtatctgatggatttttccctatgggagatacagttgaacttgcagcacaacatggtataaaggcaattatccaaccgagtggttcgattaaagatcaagattcaattgatatggctaataaacatggtattgcaatggtagtcacaggcactcgacattttaaacactaattttaaaggggcgtaacataaatgaatgtattagtaattggtgctggtggacgagaacatgcacttgcatataaacttaatcaatcgaatctagttaaacaagtgtttgtcattccaggtaatgaggcaatgacacctatagctgaagtacacactgaaatttcagaatctgatcatcaagcgatactagattttgctaaacggcaaaatgttgattgggtagttataggtccagaacagccgctaattgatggattagcagacattttacgagcgaatggtttcaaagtgtttggtccaaataagcaagcagctcaaatcgaaggctcaaaattatttgctaaaaagataatggaaaaatataatattccaactgctgattataaagaagttgagcgaaaaaaggatgctttaacatatattgaaaactgtgaattgcccgttgttgtcaagaaagatgggttagctgctgggaaaggcgttattattgcagatactattgaagcagccagaagtgctattgagattatgtatggtgatgaagaagaaggtactgttgtatttgaaacgtttttagaaggtgaagagttctcgctaatgacatttgttaatggtgatttagcagtacctttcgactgtattgcacaagatcataaacgcgcatttgatcatgatgaaggaccaaatactggtggtatgggggcttattgtccagtaccacatattagtgacgatgttttaaaacttacaaatgaaacaattgcacaacccattgcaaaggcaatgcttaatgaaggttatcaattcttcggtgtattatacattggtgctattttaactaaagatggtccaaaagtaatagaatttaatgcccgttttggtgatcctgaagctcaagtattattaagtcgcatggaaagtgatttaatgcagcatattattgatttagatgaaggaaaacgtactgaattcaaatggaaaaatgaatctattgtaggggtcatgttggcatcaaaaggatatcctgatgcatatgaaaaagggcataaagtaagtggctttgatttaaatgaaaactattttgttagtggattaaagaagcaaggtgatacctttgttacttcaggtggtagagttatacttgccatcggaaaaggtgacaatgtacaagatgcacagcgagacgcatacaaaaaagtatcacaaatacaaagtgaccatttattctatcgtcatgacattgcgaataaagcactacaacttaaataagtaaatttaaaatactaagattagctatgaacgaatctataacgatagattttttcatagcttttttagttgtagagtctaggacattgatttctgtaccaaatttgtgattatgcatatgtaatacaaaagaggcgccacaacatgtttggatgaacaaaataacatgtttgtggcacctcttttgtttagtatggaataaatggttttctttttctatacaatgaatttctaatttagtatctatacaattatggataaaatttaacctacacgaccaagacgaacatcatctatgcccgtgatgggtaaggtgattgaacaataatatgccatagtaataatggcaattaaaactataataaagattatatctttatatgagaaaggtacgttgtaatagtaagtacgaggaccatctctaaatcctttcgactccatcgcaactgataattgatgtgcctttctaatattttggcttaatagaggtataattaaatgcttaaatcgctttaaccctctataatttgccgcgtctatcatctgatagcgcatttttaaagatctgcgaagctgtattaaagaactaatcattaaaggtatcatacgaatggcagccatgaatgcataagcaacttttgatttaacctttaaatgttgcattaaactataaaatatcatgacaacctgagatgtaagtgcgattaagataccgaaaaatgaaatagcaatggttcttaatgatacatgtaaaccacgaactaaactttctgttgtaatatggataaatccgaatttcaaaattgtatggctaccattcccgtataaaatcatgaacagggaagagagtaatgcaaagccaatacttatagttataaaaattgctgtaattttaaactgagtaccattaaacatcaataagaaaactaacattaagatagtgatataaagcataaaatcgaaattatgcacaaatataataaagaaaaatagtataattccaagaaatagtttcgttataatgttgacatcatcaacaaatgattgccgaactttccattgctcatacattcgtatcaccatcacaatctagtaacgcaccatctgaaattttaagtcttcttgatggataacgttcaattatttcatcgtcatgtgtaaccatgacaatactttgtcccaaattaattcgcttttggaaaagtttgatcaactggaatgtattatggctatcaagtccaaatgtcggttcatctaaaaagataatatcagctttagaacttagtgcggtagctacgctaaggcgtcgtttttgaccaatagacaactcataaggatgttgatcttttacattttgtaaatctaaaagttttaaaagttgtatcgtttcatcatcactttgatctttagaaaggtgattaaaatgaatgttaatttcatcataaaccgaatttgttataaattgtaattctgggttttgataaactaggtacatgtgttttgctgcatgtttaatttttgttaaacgctgattttcaaaataaacatcaccttgatatttaatcaattgcataattgattcaagcaaggttgttttaccactaccatttgcccctgtaattgtaatccactcacctagaccaatttctaaatctgagaatgagagcaatgttgatttaccgcgaataatacgtccatttttaaattgtaataagtgtgagtttgttgttggaaagtcaacacgacttggtgcgaattcccatgcacgtggatgccacacaccatattcactgagtaaatgaacatacttctgtaatatgatttcaggacattcatcggcaatgatatttccgttataatccatcaaaatgacgcggtcgacatgattccagatgtgtttaactttatgttcaacgattacaaccgtttgatcttcccaaagttcaattagtttagtccataaatcttctgttgcttgaacatctaacattgctgtcggttcatctaaaaacaatgtttttgattgttgaagaatggtttcaacaattgccaatttctgtttcatcccgccacttaaatctttgatatacgtttcaggggtaacatttaaattgaccatatttaaagcattgataattaacgcatccatgtcttcacgtggtaattgtctattttctaaaacgaatgcaagttcttcgtatacttttggcatacaaaactggctatcagggtcttggaaaataacgccacttaatgggtcaacgattagttcatcatatttcataggtaattcaattaaattaggaacaataccacttaatacattcagaagtgtacttttaccgcaaccagaaggaccgagtaaaagtactttttctttgtcttgaatagtgatatttaaatgatcgaaaattttacgttgaccacttggatattttaatcgtaaatcacttacttttaacactctgaatgctcctcttataagttgtcgtaatcttctttagcagctggtctaaataattttgttacgcctgtcttatctaaagcttttactaaaaggtaagataggacgccggcgactactgcaccactaattaatctaaatacgatgaataatgttaagttccaacctgcaacttcatttaaataaccatagaaataatctatcgggaaagccgcgattgctgtacaaaaacctgctaacatagctaccataactgaacgtgattgatatttaaaaattgcaaagacaagttcacacgctaaaccttgtataaaagcgtaaacgattgtcggaatatcgaaacgacccataatgatagtttcgccggcacctgcagcaaattcagccagtaaagcaatacctggttttggaataattagatagcagacaatcgctgccatgaaccaaaccccgtttgttaattgttcgaggtgaaggcctgtagcttgcacaccattgtaaacaaaccaccataaattgtaaataactgcgaatactactgaaataagtacggttactagtatttcagatagctttaaaccttttgacatttttacatcctcctaataaaaaaacgcacaaccatccataggaaagttatgcgttcacaatatatattagtaaaacatatgtatagtaacactttcctacgctagttcaagctagatcaggttcaaagggtttgagggcaagcctcatctcagtataaaacacccctagtgtgtgcgatttatttaattaattatactgtaagacgtttgtaaacttatgtcaataggttgtcttcatgaaatttcgtttaattcgatttaaaatttataatattagcattggatttaaattgaagatgtagtaggaatgttagtaattaaagatataaaaatatgtgacatgtaataatattgagctgataaatgaagagggatacttatcaatcatacctctttaacaacagtgaagaacccgtgcataatggcttacgaattatagtttataaggaagaagagggatacatgcgccgagcacatgcataaaagcccctaacaactaaaagttgtaaggaaggagagggatacatgcgccgagcacatgcataaaatcccctaacaactaaaagttgtaaggggatttaaattaatttagtgtatcttggatatcttgttttgtttgattaatatcttctgttttttcttcttttttatcttttaatttttcttcaacttctttagctttttctgctgcttttttattttgattttcattagacatgattaattcctcccaaattggataattatttatatataaatcttacccggttgtactttcgttaaacttttctaagtctatagcactatttattcatttatctaaagacaacaacattagattaatatataatgattttgaggtgaacataatgtcttttcttaggaaacacgccgaaattatttttagctatttaatcggtatcgtttcactcttcactggtctcattattttaattaacttgccattaattaaacaattaaatggtggtaaaaaagttgatacacatgttcataatgtgtgggaatttctgaatgcatttttcagtgaaattattaaagtaatgagtcgatttataggtaatttccctatagttagtgcaattgtgataattatattcggtattttagttatgttgattggtcatacattacttagaactattaagtatgactatgatatttctatctttttcttagttatcggtatcatgtactttattattactcttatattaatgactcaagtttatggattctttgcagtgattttcattattccatttacaattcatataggatatatcgtctataaagatgaattgaatcaggaaaatgtaaaaaatcatttcatgtggataattgtgagttatggtataagttacttaattacacaaattgcattgtatggcagaattgatgctaatgaaatagagtcaattgatatcttaagtgtcaatgctttctttataattatgtggttacttggtcaaatggctatttggaatttcttgttcttgcgccgagctttacctttaacaaagcaagaattaggtgaagaggagccagaattatcaagaacaagtaaagggaatgtcacgaatcaaactaaaattcacttgaaacaactccaagataagactacagaatatgcacgtaagacaagaagaagtgtcgatttagataaaattagagctaaaagagataaattcaaaaagaaagttaatgatattatcgatattcaagaagacgatattcctgattggatgagaaaaccgaaatgggttaaaccaatgtatgtcgaactattttgtggtgtcgtcatctttttattcacatttttagaatttaataatcgtaatgcattatttgtatctggtgattggaaattatcacagacacaatatgttattgaatgggttacattattaattctgttattcattattatcgcatatatcgctacaacgttaactttccacttgaaaggtaagttttattatttacaattatttatggggagcattttattctttaaattgttaacggaatttataaatataatgattcatggactattactttcagtgttcattacgccaacattactattaatgttattggcaatcatcatttcttattcgttacaattacgagagcgaccataattaaaagcattataaaagtactatctattaaacattttgatgtgtacgctataagttagatatatctctaacttacttagatacaggtcaatgaagtttatggatagtactttttttgtaactagatttgattgattcaggtgatgtgaattaagtattgaaaattgtatacaaagttttagtgcaaataaaatagttgaaaagttatccatttgtaaaatcaagaaaactagtaaatagttgaagcgacttatggaatttgcgaaacgatatatagtatttcctttgtagaaatttaacatatatcattcgaattactaatttgttaaaatcaacagtaagattagaagtagatgatattgaaatttggcaaacaatttaatctatataaaactacaacgaaacacagaaaggaagttgtcagatgaaaatagcaactctgaacaaaggcaaagaaacaaaatattttaatggatatcctttaattgaagaagaggatatctattcacaagatcatttaaaagaaggagatatttttcaaattgtgactgataaatcacaatatgtcgcaacggcttatgttggtcgccaacataaaggattaggttgggttctaacatacgataaagctcaacaaatcaacacagctttctttgtaaaattgtttaatactgcattagcagaacgtgattattattttaatatagatggaacaaatgcttttagattatttaatgctgaaggtgatggtgttgggggattaacaatcgacaattacgatggtcatttgttgattcaatggtactcaaaaggtatttataaatttaaatatgccattcttgaagcggttagaaaagtatttgattataaatctatttacgaaaaagtaagatttaaagacagcgaatatagtggtggttttgttgaaggagatgcacctgagtttccaattgttatcgaagaaaacttcacattttataatgtagaccttgaagatggtttgatgacaggtatctttttagatcaaaaagaagtgcgcaagaaattaagggatcaatatgccaaagaacgccatgttttaaacttatttagttatacaggtgctttttctgcaatagcagcaagtgaggcatcttcaacaacaagtgtagatttggctaatcgttctcgtagtttaactgaagaaaattttggattaaatgctattgatcctaaatcccaatatatttatgtcatggacacttttgatttctataaatatgctgcacgacatggacatagttatgacacgatcgtgattgatccacctagctttgcgcgtaacaaaaaacgtacattttcagtgcaaaaagattatgacaaattaattaatggcgccttaaatatcttatcatctgaaggaacattattgttatgtacaaacgcaagtgtatatccattaaagcaatttaaaaatactattaaaaagacgcttgaagagagtggcgttgattatgaattaactgaagttatgggattaccaaaagattttaaaacgcatccacattataagccatctaaatatttaaaagctgtttttgtaaatattagacattaatttgataaaaaggggtatagtaacttattgagaaaaagaagggtgataatattatgggattcaaaaacaatttaacatcaaatttaacaaataaaatcggtaattcagtctttaaaatagaaaatgttgacggaaaaggtgcaatgccaacgacgattcaagaattgagagaaagacgacaacgtgctgaagcaattgtaaagagaaagtctttaatgtcatcaacaatgagcgttgttccaattccgggtttagattttggtgttgatttaaaattaatgaaagatattatcgaagatgttaataaaatttatggtttagatcataagcaagttaatagccttggggatgatgtgaaagaaagaattatgtctgcagcagcaattcaaggtagtcaatttattggtaaaagaatttcaaatgcatttttaaaaattgtaattagagatgtagctaaacgtactgctgcaaaacaaacaaaatggtttcctgttgtaggacaagctgtgtctgcatctattagttactattttatgaataaaattggaaaagatcacattcaaaaatgcgaaaatgttattaaaaatgtcatgtaggtgctataatagttttgcaatttgcaaattttactgaaaccggttttaaacgaattgaatttaaagcatggttttggtaaagttaatgtataaaactaagttagtattgtaataatattgaagattctaactatacgaaggagaaatgtaattatggaacaaaattcatatgtaatcatcgacgagactggtattcacgctagaccagcaacaatgttagtacaaacagcttcaaaattcgattctgatattcaattagaatataacggtaagaaagtaaacttaaaatcaatcatgggtgttatgagccttggtgttggtaaagatgctgaaattacaatttatgctgacggtagtgatgaatctgacgccattcaagcaatcagtgacgtcttatcaaaagaaggattgactaaataatcatgtctaaattaattaaaggtattgccgcatctgatggtgtcgcaattgctaaagcttatttattagttgagccagacttaacattcgacaaaaatgaaaaagtcactgatgttgaaggagaagttgcaaagttcaatagcgctatcgaagcttctaaagttgagttaactaaaattagaaataatgcagaggttcaactaggtgctgataaagctgctatctttgatgcacatttattagttttagatgaccctgaattaattcaaccaatccaagataagattaaaaatgaaaacgctaatgctgctacagcattaacggatgtaacaacacaatttgttacaatttttgaatctatggataacgaatacatgaaagaacgtgcggctgatattcgcgacgtttctaaacgtgtgttatcacatattttaggtgtagaattaccgaatccgagtatgattgatgaaagcgttgttattgtagggaatgacttaacgccatctgatactgctcaattaaataaagaattcgtacaaggttttgctacaaacattggcggaagaacaagtcactctgcaattatgagtcgttctttagaaattccagcaattgttggtacaaaatcaattactcaagaagttaaacaaggcgacatgattatcgtagatggattaaatggtgatgtaatcgttaatccaactgaagatgagttaatcgcttatcaagataaacgtgagcgttattttgctgacaagaaagaattacaaaaactacgtgatgctgatactgttacagttgatggtgttcacgcagagcttgctgcaaatattggtacacctaatgatttgccaggtgttattgaaaatggtgcacaaggtatcggcttatatagaactgagtttttatatatgggtcgtgaccaaatgcctacagaagaagaacaatttgaagcttataaagaagtattagaagcaatgggcggtaaacgtgttgttgtacgtactttagatataggtggagataaagaattatcatacttaaacttgcctgaagaaatgaatccattcttaggttaccgtgcgattcgtttatgccttgcgcaacaagatattttcagaccacagctacgtgcattattacgtgcatcagtttatggtaagttaaatatcatgttcccaatggttgcaacaattaacgaatttagagaagctaaagctatattattagaagaaaaagaaaaccttaaaaatgaaggtcatgacatttcggatgatatagaattaggaatcatggtagagatacctgcaacagcagcattagctgatgtctttgctaaagaagtagatttcttcagtatcggtacaaatgatttaattcaatacacattagctgctgaccgtatgtcagagcgtgtatcatatctataccaaccatataacccttcaatcttacgtttagttaaacaagttattgaagcgtcacataaagaaggtaaatggacaggtatgtgtggtgaaatggctggagatgaaacagctattccattattgcttggtttaggtttagatgagttctctatgagtgcaacgtctattctgaaagcaagaagacaaattaatggtttaagtaaaaatgaaatgactgaacttgctaaccgtgcagtcgactgtgcaacgcaagaagaagttattgaattagttaacaactacgtaaaataattaattctttcgaaagacagaattataaataaacccgaagtattcattgtaagtaattatgaatacttcgggttcttttttatgatttatgttaatttcaatggaatgttgttgctaactaattaaacaactatgtgtcattaacaaaatgtagttctttaattaatgttagttaatttaaaaatcgatatttaatttatgatagctataaatgatgaagttgatttagatgaaaattaatcttggatatttaatactttgttgatttcatcaagatcaacatggtacattggattgccattcaacaaaataaacggagttgaaaaagcatcaaaatctatcatttcgtttcgatattgttgattgttgatatttctctcttcaaaatcaatgtgatgctcatttagataattttttacaaatgtacaaggtggacaatcattctgcgtataaacgattatttctgacatgtatcatgctccttcgtgctttattctaatgtaatatacacaattatacattgaaattcaaatttgtgaacacattgtgaactggcataaattatacacaatttcatagcgcataatgttttaaaaatacacattatagcaattataattaagttcattgtgttgtcatcaaaaaaagaaaaaggtgatgtttttaaatggatacagttgaaatcagtcggtttttgacagctatgactttagcagttcatatcatttttgcaacgattggtgttggtatgcctttaatgttcgcaattgcagaatttttaggtattcgcaaaaatgatcttcaatatatagctatggccaaaagatgggctaaagcttatacaattactgtagcagtgggagttgttacaggtacaattataggacttcaattatcattgatttggcctacatttatggaaatgggtggacacgttattgcacttccattatttatggaaacatttgcgttcttctttgaagctattttcttaagtatatatttatatacttgggatcgttttaaaaataaatggacacatttcttaattagtataccagtaattattggtggctctttctcagcattcttcattacttcagtgaattcatttatgaatacgcctgcaggttttgagttgaagaatggaaagatggtcaatgttcaacctatagaagcgatgtttaacccatcgtttatagttcgatcatttcacgtaattactacagccggtatgacgatggcatttgttattgcatcaatagcagcttttaaattattgcgtaatcgtcaacctaaagatactgtctaccataagaaagctttgaaaatgtctatgatagttggattcttttcaacattactttctatgttggcaggggatttatctgcaaaatttttgcataaattccaacctgaaaaattagcagcttatgaatggcatttcgatacatcttcccatgccaaattattattatttggtgtgttagatgaaaagactcagcaagttaaaggtgcgattgaattacctggactattgagtttcttagcagataatagtgtcaaaactaaagtacaagggttaaatgattttccaaaaagtttacatccgcctatgatcgtccattatttctttgatttaatggtaacgatgggaattttatgttttgtcatttcaggtgtttatgtcttaactttaatgtttaaaaagcttagaaagttttctactcataaatggatgctttatggaatattattaacaggcccagcttcaatgctagctatagaatttggatggttcttaacagagatgggtagacagccttggattgttcgtggttatatgcgcgtggcagaagcagcaacacaagcaggcggaataaccttcgttacaattttatttggcatattgtacatcattttaatgtatacatgtgcatacgtattaattcgtatgtttaaaaataaaccggcgtatgaagatgtaaatcgtttagccaagaagcaaggaggagaaatagaaaaatgatttatgcatttataggtataacagtgttatggttgtttttattttgctatatcattattgcttctatagattttggggcaggtttcttcgcattgcattcaaagttaactggtgatgaaaagaaaattaatcacttaatttcacgttatttaaacccagtttgggaagttacgaatgtattctttgttttcttcttcgtaggattcgtaggtttctttccagagtcaatcaaatatttaggcacggtattgttaataccaggttcaatagcactgattatgatatcgttgagaaacagtttttatgcatttgaaaattatggtcaagatacaaaattagcatggatgatcatgtatggggtaagtggattattaattccagcttcattatctactgctttaactattacagaaggtggctatattaatgttcgaaacaatgttatcgatctagattgggtgcagttattattaagcccatttgcttggtctgtagtattcttggcaattatttcagttttatatatttcatcaggatttttgacatattatgctaaaaaagcaaatgacgaaccagcatataatttaacaagacaatggcacatatttttagggccgccgatgattatcatttgtttattcgtatttctatcattacgcattcaaaattctgaacatttttattcagctgtttttgactattggtggatgtttggtataagtttcttattctttgcattagcttcattgttaacattctttaagaaaaaacatggtttggcttttgtatttgttattttacaaatgatgttcgcgttctttggctatggaattagtaaattgccataccttttatatccgtttgtaaaaattacagatgcatatgttaatccagaaatgggctggacattagtgattgtctttattttaggtttacttttattacttccatcgttaatattattattaagattatttgttttcgacaaagaatatgttgaaggaaagaaatcataagttgagacgataccccaactttcatttacttgcattactgcatttagataatttagttggggtactcatttataataattttaaatttatattttcaatgaattgatgaaaatcatttaatggagggcgagtatgggtaaagaatatgtagtcatcggtctaggtcgttttggaggtagtatcgttcgtgagttgaatgcattagacatggatgtaatggccatcgaccatgatgaaaatagagtgaatgaatatagtgatatcgctactcatgcggttgttgcagacactacagatgaagcagttatgaaaagtttaggtatccgtaactttgatcatgtcattgtggcaattggtgaaaatattcaatcaagtacgttgacgactttaattttaaaagagttaggtgtaaaaaaagtaactgctaaagcacaaaatgattatcatgcaaagattttaaataaaattggagcagatacggttgtgcaccctgagcgtgatatgggtagacgtattgcgcataatgttgcgagtgcaagtgtacttgattatcttgagttggcagacgagcattctattgtagaattgaaagcaactgaaaagatggcggggcagtctatcattgatttagatataagagcacaatatggaattaacattattgcaattaaacgaggcaaagagttcatcatttcaccaaatccaaatattaatttagaaataggtgatattttaatcatgattggacatgataatgatttaaatcgctttgaaaaaaatattgcgacgagataatcgggagtgggacagaaatgatattttctcaaaatttatttcgtcgtcccaccccaacttacattgtctgtagaaattgggaatccaatttctctttgttggggcccacaccccaactcgcattgcctgtagaatttcttttcgaaattctctatgttggggcccctgactagaattgaaaaaagcttgttacaagcgcattttcgttcagtcaactactgccaatataactttgtagagcattgaacattgatttatgtctcaagctcatcatatataaagaaaaagctactaacaatgggtggtgagtttaattaaaacttcacttcaaagttagtagctttttgattatttattgtttgattctttttgttcgtttaccttcataatgactggtaaaatcattggttttctagctgttttttcaaataaataaggttgtaatgtttcaatgatagaagatttaatctgatgccattgaatatctttattttgatttaacttactaataacatcagttttgattttgcgttgtgcatcataaattaattgacctgattccctcatatatacaaatcctcgagaaataatgtctggaccagaaagtaatttatttgtattaaaatcaatactaacaacaacgataactaaaccttcttcagataatagcttacggtctcttattacaacattaccgatatcaccgataccactaccatcaacaagtacattaccagatggaatgcgaccagctttacgtgctgaatcgtgtgttaaagctaagacatctccaatatcaaagatgaagacattatcttcttcaacgccgcattcaacaccagtctcaccatgtgcttttaacatacggtattcaccatgaataggtaagaaatatttcggcttgattaatcgaagcattaattgttgatcaccttgagaaccatgccctgaagtatggatgttagaaatcttgctatggataacatctgcaccagctttatacaaggaattaatagttctgttaatactttttgtattacctgggataggtgatgaactaaatacaacggtatcttcaggtataattttaatttgcttatgagtaccattagcaattctagataatgctgccattggttcaccttgtgaaccagtacatagtatcaataactcatgcttcggtacggtattaattttattaggttcaataaatgtttcaggtggtgctttaatataaccaagttccatacctattttaatattgttttccatcgaacgaccgaacgtaacaattttacggttatttttgatagcagcttcaactgcttgttgaactcggtaaatattagaagcgaaggtagcaaatataatacgacctttacaattacggaagatcttatctacgttttgaccaacttcacgttcgcttaaagtaaaatcaggcacaagtgaatttgttgagtctgaaagtaaacatagaacgccttcttcgcctaattgagccattttagcaatgtttgctggtttgcctacaggtgtaaaatcaaatttaaagtcaccggtatgaactacttttccttcaggtgtatctacgatgacgccataagtttcaggaatactatgtgtagttaagtagaaagaaatcgtaaagtgcttagatttaatcacactgtcctcattgatttcatttagtttagcagtacgtaataaatgatgttcttcaagtttattacggattaaacctaatgctaaaggaccaccataaataggtatattaagttgttttaataggaagggcacaccgcctatatggtcttcgtgaccatgtgttataaataggccaacaattttatcttggttttgaactagatatgtgtagtcaggtataacataatcaatccctaataagttatcatcagggaatttgatacctgcatcgataatgacaatttcgtctttatactcaactgcataagtatttttaccgatttcacctagacctccaagtgcatatacacctacttcatttggatgtaattgtttcattatttagcaatctccacattaaagtgttctgagttttctttttcgtaatctaaatgtgcgccctctaatttagtgataaattcgatattaaaattacgatctttcaagtaacgacgtacttgttcttctgtttgagcttcaacataaagtgattgtgtattttcacgcacaattacctcgtctctgttatgttgataaaaaactttaaatactgccatgttaaaaattcctcctaagaatgtttgtttaatttattgttaaccctagtaaaatcgtattggagtatatatcgataaattcattccaatcatctctataatgtaacttaataacgatttggttaataactaggttcatcatgtcgttcattttaaaaaattagtgaaataacactaaaatttcagttaaatcttattttacatgatgaatgataataaataaagcagtttatctcactagaaatctaagtatttcgaataaatgtgcagttctatttattaaaataaatgtagagattataaattaatgttaagaaagaattaaaggattttatatgaaacggtaaaatttaaatgaggggataaaaagtttggtagaaaggtgaatatatttaactgttgtttattcgaaaaagttgtaaaaggaaaagcttaggacatcatatttatcctaagctttgataattagaaaaatgtgttttaaacttctactgcatctgtatgtggttgtaatgggtgatctttgtcaatgtgatcatagaacattacaccatttaaatggtcaatttcatgttggaaaacaattgctggatatccttttagtcgtaattgtatatcattaccttcgatgtctttggctttaattgtaattctattatgacggtgaactagaccagcaacattatcatcgacactaaggcaaccttcaccagttggtaaataagcttcttgaacgctatgacttacaatttttgggttcacaagcatatagtcataagatttgccactgccatcatctggtattaaaacagcaatcatacgtttagaaatattaatttgaggtgcagccaaaccaacgcctgaacgtaaaccatatcgtttcgcgatttcctcatcttgactatttactaaaaactctctcatggcgattaatgtttctttttcttctttagttaatggtaattctaactcagctgctttttgacgcaaagttggatgaccatctctaatgatgtctttcattgttaacatatattgcaccttccttattttaatttgttttagttgaatgacagtaaaaaggttgttaagatactcatacatttttatgtgtaaatatctacaaagttaaccaactactgccaatgtttattttagatagtatatgtaaattttcagatatgctaattgcttaaaaaatgattaaagtgttggtttcaagcaatgatactttagaaatttatttatcatcttgactttaaaaattatattataaatgacgtaactgtcaacagatatacttagtaatgaagatgtgtaatgtaattgtttaaaattgatttccaagcagattttatttatcatttaatttaaatagcaagtggaggtacaagtaatgaaatttggaaaaacaatcgcagtagtattagcatctagtgtcttgcttgcaggatgtactacggataaaaaagaaattaaggcatatttaaagcaagtggataaaattaaagatgatgaagaaccaattaaaactgttggtaagaaaattgctgaattagatgagaaaaagaaaaaattaactgaagatgtcaatagtaaagatacagcagttcgcggtaaagcagtaaaggatttaattaaaaatgccgatgatcgtctaaaggaatttgaaaaagaagaagacgcaattaagaagtctgaacaagactttaagaaagcaaaaagtcacgttgataacattgataatgatgttaaacgtaaagaagtaaaacaattagatgatgtattaaaagaaaaatataagttacacagtgattacgcgaaagcatataaaaaggctgtaaactcagagaaaacattatttaaatatttaaatcaaaatgacgcgacacaacaaggtgttaacgaaaaatcaaaagcaatagaacagaactataaaaagttaaaagaagtatcagataagtatacaaaagtactaaataaggttggtaaagaaaagcaagacgttgatcaatttaaataattaatataatacagatggtaggaaacaactaatacagttcctattatctgtatctttttttattaaaacagaactttttcaaatggtttaacagtcccatttatttgtggtacaattagtaaggataaaatgaatttctatacaattatgggaaaggtatggtgaattgaatggctcctaagttacaagcccaattcgatgcagtaaaagttttaaatgatactcaatcgaaatttgaaatggttcaaattttggatgagaatggtaacgtcgtaaatgaagacttagtacctgatcttacggatgaacaattagtggaattaatggaaagaatggtatggactcgtatccttgatcaacgttctatctcattaaacagacaaggacgtttaggtttctatgcaccaactgctggtcaagaagcatcacaattagcgtcacaatacgctttagaaaaagaagattacattttaccgggatacagagatgttcctcaaattatttggcatggtttaccattaactgaagctttcttattctcaagaggtcacttcaaaggaaatcaattccctgaaggcgttaatgcattaagcccacaaattattatcggtgcacaatacattcaagctgctggtgttgcatttgcacttaaaaaacgtggtaaaaatgcagttgcaatcacttacactggtgacggtggttcttcacaaggtgatttctacgaaggtattaactttgcagcagcttataaagcacctgcaattttcgttattcaaaacaataactatgcaatttcaacaccaagaagcaagcaaactgctgctgaaacattagctcaaaaagcaattgctgtaggtattcctggtatccaagttgatggtatggatgcgttagctgtatatcaagcaactaaagaagcacgtgaccgcgcagttgcaggtgaaggtccaacattaattgaaactatgacatatcgttatggtcctcatacaatggctggtgacgatccaactcgttacagaacttcagacgaagatgctgaatgggagaaaaaagacccattagtacgtttccgtaaattccttgaaaacaaaggtttatggaatgaagacaaagaaaatgaagttattgaacgtgcaaaagctgatattaaagcagcaattaaagaggctgataacactgaaaaacaaactgttacttctctaatggaaattatgtatgaagatatgcctcaaaacttagcagaacaatatgaaatttacaaagagaaggagtcgaagtaagccatggcacaaatgacaatggttcaagcgattaatgatgcgcttaaaactgaacttaaaaatgaccaagatgttttaatttttggtgaagacgttggtgttaacggcggtgttttccgtgttactgaaggactacaaaaagaatttggtgaagatagagtattcgatacacctttagctgaatcaggtattggtggtttagcgatgggtcttgcagttgaaggattccgtccggttatggaagtacaattcttaggtttcgtattcgaagtatttgatgcgattgctggacaaattgcacgtactcgtttccgttcaggcggtactaaaactgcacctgtaacaattcgtagcccatttggtggtggcgtacacacaccagaattacacgcagataacttagaaggtattttagctcaatctccaggtctaaaggttgttattccttcaggcccatacgatgcgaaaggtttattaatttcttctattagaagtaatgacccagtcgtatacttagagcatatgaaattgtatcgttcattccgtgaagaagtacctgaagaagaatatacaattgacattggtaaggctaatgtgaaaaaagaaggtaatgacatttcaatcatcacatacggtgcgatggttcaagaatcaatgaaagctgcagaagaacttgaaaaagatggttattctgttgaagtaattgacttacgtactgttcaaccaatcgatgttgacacaattgtagcttcagttgaaaaaactggtcgtgcagttgtagttcaagaagcacaacgtcaagctggtgttggtgcagcagttgtagctgaattaagtgaacgtgcaatcctttcattagaagcacctattggaagagttgcagcagcagatacaatttatccattcactcaagctgaaaatgtttggttaccaaacaaaaatgacatcatcgaaaaagcaaaagaaactttagaattttaatacattttaaaagttaacgaagttagcgtattttagtctcattgattaaaatgaaatgtttaatttacgaaatcttaggagggcaaaaacgtggcatttgaatttagattacccgatatcggggaaggtatccacgaaggtgaaattgtaaaatggtttgttaaagctggagatactattgaagaagacgatgttttagctgaggtacaaaacgataaatcagtagtagaaatcccatcaccagtatctggtactgtagaagaagttatggtagaagaaggtacagtagctgtagttggtgacgttattgttaaaatcgatgcacctgatgcagaagatatgcaatttaaaggtcatgatgatgattcatcatctaaagaagaacctgcgaaagaggaagcgccagcagagcaagcacctgtagctactcaaactgaagaagtagatgaaaacagaactgttaaagcaatgccttcagtacgtaaatacgcacgtgaaaaaggtgttaacattaaagcagtttctggatctggtaaaaatggtcgtattacaaaagaagatgtagatgcatacttaaatggtggtgcaccaacagcttcaaatgaatcagctgcttcagctacaagtgaagaagttgctgaaactcctgcagcacctgcagcagtaacattagaaggcgacttcccagaaacaactgaaaaaatccctgctatgcgtagagcaattgcgaaagcaatggttaactctaagcatactgcacctcatgtaacattaatggatgaaattgatgttcaagcattatgggatcaccgtaagaaatttaaagaaatcgcagctgaacaaggtactaagttaacattcttaccttatgttgttaaagcacttgtttctgcattgaaaaaatacccagcacttaacacttcattcaatgaagaagctggtgaaatcgttcataaacattactggaatatcggtattgcagcagacactgatagaggattattagtacctgttgttaaacatgctgatcgtaagtctattttccaaatttcagatgaaattaatgaattagctgttaaagcacgtgatggtaaattaacagccgatgaaatgaaaggtgctacatgcacaatcagtaatatcggttcagctggtggacaatggttcactccagttatcaatcacccagaagtagcaatcttaggaattggccgtattgctcaaaaacctatcgttaaagatggagaaattgttgcagcaccagtattagcattatcattaagctttgaccacagacaaattgatggtgcaactggccaaaatgcaatgaatcacattaaacgtttattaaataatccagaattattattaatggaggggtaaaacatggtagttggagatttcccaattgaaacagatactatagtaatcggagcaggtcctggtggatacgttgcagcaattcgtgcagctcaattaggacaaaaagtaacaatcgttgagaaaggtaatcttggtggtgtttgcttaaacgtaggatgtattccttcaaaagcattactacatgcttctcaccgttttgttgaagcacaacattctgaaaacttaggtgttattgctgaaagtgtttctttaaacttccaaaaagttcaagaattcaaatcatcagttgttaataaattaactggtggtgttgaaggcttacttaaaggtaacaaagttaacatcgttaaaggtgaagcatatttcgtagataacaatagcttacgtgttatggacgaaaagagcgcacaaacatacaactttaaaaatggaatcattgcaacaggttcaagaccaattgaaattcctaatttcaaattcggtaaacgtgttatcgactcaacaggtgctttaaacttacaagaagtaccaggtaaattagttgtagttggtggaggatacattggatcagaattaggtacagcatttgctaactttggttcagaagtaaccatccttgaaggtgctaaagatatcttaggtggcttcgaaaaacaaatgacacaacctgttaaaaaaggtatgaaagaaaaaggtgttgaaatcgttactgaagctatggctaaatcagctgaagaaacagataacggagttaaagttacttatgaagctaaaggcgaagagaaaacaatcgaagctgattatgtattagtaactgtaggtcgtcgtccaaacacagacgaattaggcctagaagaattaggtgttaaattcgctgaccgtggattattagaagttgataaacaaagccgtacgtctatcagcaatatctatgcaattggtgatatcgttccaggtttaccacttgctcacaaagctagctatgaagctaaagttgctgctgaagcaattgatggtcaagctgctgaagttgattacattggtatgccagcagtatgctttactgaaccagaattagctacagttggttattcagaagcgcaagctaaagaagaaggtttagcaattaaagcttctaaattcccatatgcagcaaatggtcgtgcattatcattagatgatactaacggatttgttaaacttattacacttaaagaagatgatactttaatcggtgctcaagtagttggtactggtgcatcagatattatctctgaattaggtttagcaattgaagctggtatgaatgctgaagatatcgcattaacaatccatgcacatccaacattaggtgagatgactatggaagcagcagaaaaagctatcggatacccaatccatacaatgtaataactgattatctataaagattcagtcattaaaagctgtagcatatgctacggcttttttgttttaggtaaagtaatgtaaggaaattgatttgagatatcgttaacatgtgacatgcatgttatactagcgatgctaacaaaagaattgaaatggagggttcaacaatggaatatgagtatccaattgatttagactggagtaatgaagagatgatttcagtgataaatttctttaatcatgtagagaagtattatgaatccggcgtgacggcaggcgactttatgggtgcatataaaagatttaaagaaattgtgcctgctaaagcagaggaaaaacaaatttttaatactttcgaaaaaagtagtggctataatagttacaaagcagttcaagatgtaaaaactcactctgaagaacaaagagtaacagctaaaaaataattcgttcgaaattaacacaatttaataggaatttttctttaaaactattgctaataaagctatattttgatacctttatcaagtgttaaacaaaatgtttgataaaagtaaacttaatatagcttttttaggtggaaaaataaatgaacataggtaataaaattaaaaatcttagaagaattaaaaatttaacgcaagaagaacttgctgaacgtacagacttatcgaaaggctacatttcacaaatagaaagtgaacatgcctcaccaagtatggaaactttcttaaatattatagaggtgttaggaacgacgccaagtgaattttttaaagacagtgaaaatgaaaaagtattatacaagaaggaagaacaagttatttatgatgagtatgatgaaggttatatattaaattggttagtttcaaagtcaaatgaatatgatatggagccattaatattaactttaaagcctggagcatcatataaaaattttaatccatcagagtctgatacgtttatttattgtatgtcaggtcagataacacttaatttaggcaaagagatatatcaagcacaagaagaagacgttttgtattttaaagcacgagataatcatcgtttgtcaaacgaatcaaacaatgaaacacgaatacttattgtagcgacagcttcatatttataggggggatcttatttggaaccgttattatcattaaaatcagttagtaaaagctatgatgatcttaatatcttagatgacatagatattgatattgaatcaggatacttttatacattattaggtccttcaggttgtggtaaaacaacaattttaaaattaattgcagggtttgaatatcctgacagtggtgaagtgatttatcaaaacaaaccaattggtaatttaccaccaaataaacgtaaagtgaatacagtctttcaagattatgcattatttccacacttaaacgtctatgataatatcgcttttggtttgaaattaaaaaaattatcaaaaaccgaaattgatcaaaaagtaactgaggcattaaaattagtaaaactttcaggttatgaaaaaagaaatattaatgaaatgagtggcggacaaaagcaacgtgttgcaattgcacgtgctatcgtaaatgaaccagaaatattattgttagatgaatctttatccgcattagatttgaaattgcgtactgaaatgcaatatgaattacgagaattgcaatctagattaggtattacatttatatttgtaacacatgatcaagaagaagcgttagcattaagtgactttctttttgtattaaaagatgggaaaattcaacaatttggcacaccaacagatatatatgacgaaccagtgaatcgatttgtagctgattttattggagaatctaatattgttgaagggcgcatggttagagattatgtcgtgaatatttatgggcaagatttcgaatgtgtcgatatgggtattcctgaaaataaaaaagtagaagtcgttattcgaccagaagatatatcattaatcaaagctgaagaaggattatttaaagcaactgttgattctatgttatttagaggggtccactatgaaatatgttgtatagacaataaaggttatgaatgggtaatacaaacgactaaaaaagctgaagtaggcagtgaagttggtctttattttgatcctgaagccattcatattatggttcctggagaaacagaagaagaatttgataaacgtattgaaagctatgaggaagtagacaatgcgtaatactaataaatttctcttaatcccgtatttactatggatggttatatttattattgtaccagttgtattactcatttatttttcatttttagatatcaatggacattttagtttcacgaattatcaacaaatttttactacaaaatatttgaaaatgtttgcatattcaattttatatgccgcttcaataacaattattaccttgactatcagttatccagctgcctattatattactcgttcgaaatttcaaaatatcttattaatgataatgattattccaacatggataaatttattgttaaagacatatgcttttataggtttattaagtcatgatggcgtgattaatcaatttttccacttatttaatttaccatcattcaatttgttatttacaactggtgcgtttttagtagtggcaagttacatttatataccatttatgattttacctatatttaatagcatgaaagcaattcctaataatttattgcaggcctcaagtgatttaggtgccagtcctttctatacttttagaaaagtaatcatgccgttaacaaaagaaggtgttatgactgggattcaagtaacctttattccatcactttcattatttatgattacaagattaattgcaggtaataaagtcataaatataggtacggcaatagaggaacaatttttaacaattcaaaattatggtatgggatcaactatagctatattcttaattgtatttatggcattcattttaatcattacaaaatcatctaatgggagagggtgaatcatatgaaatggtatggaaagctgtatatcgggatacttttagcgattttatacatcccaatattctttttaatgttctattcattcaattcggctggtaatatgattcactttgaacattttacattagagcattatcaatcattatttcaaaatgatcatttaatgtcggtcatttttaatacgatagctgtagcacttttagcagcctcaatttctacagttattggtacatttggtgccattgctatttattatttaagaaataaaaagtttaaagtaactttactaacattgaataatgtcttgatggtatcatccgacgttgtcataggtgcatcattcttaattatgtttacaacgattggccattttactggtcttggtttaggattttggacagttctaatatctcatattgcattttgcatacctatagttgtgattatcgtcttaccacaactgtatgaaatgaataataatatgttaaatgctgcaagagatttaggagcgactgaaccacaattattaagcaacattattattcctaatattttaccttctattataggaggattctttatggctttaacttattcactagacgatttcacagtaagtttcttcgttactggtaatggctttagtgtgttatcagttgaagtttatgctatggcgagaaaaggaattagtatggaaattaatgcgatttcaacattattgtttgctgttattgtattaggaatactaggatattatttgattcaatacgtgataaataagaaaaaactaatcaagcgaggtgtaaaataatgaaacgatttttacaactcattataggtgcattagttgtgggtatgctttgtcttactttaagtcattggtttaaatctaaagaacaagtgcatacaaatcaaaaaatttacgtatacaattggggcgaatatattgatccagagttaattaagaaatttgaaaaagaaactggcattcaagtcgtttatgaaactttcgattcaaatgaagcgatggaagccaaaattcgcaatggcggtacacattatgatgttgcttttcctagtgaatatacagttcaaaaattgaaaagagatcatttattgttaccaatagatcataataaggtacctaatattaaaaatttagattcagattatatgaatatgtcatttgatagaggcaataaatattctttaccttatttctttggaactgtaggtattttatataataaagaaaagtatccaaatgaatcatttgatagttggaagtcattgtataatcctaaatttaaaaaccaaattttactagttgacggtgctagagagattataggcatgagtttgaataaacttgggtataatcttaatgaccgtaattcgcaccatttaaaagaagcagagcgagatttaaccaaactagcaccacaagtaagaggtgtcgtaggtgatgaaattaccatgatgcttcaacaaaatgaaggtaacatagcggttgtttggagtggtgttgcagcacctctagtgcaagaaggggataaatataattatgttattcctaaagaaggatcgaatttatggttcgacaatatggtaattccaaaaacggcacaaaataaagagggtgcatataaatttatgaattttttattagatgctaaaaataacaagcaaaatacagaattcgtaggctatgcaacgccaaacaaggctgctcgacaattgttgcctaaagagattaaagacgaccatcgtttttatccgactaagaaagagcaagaacgccttgaagtttataaagatttaggacctgaagttttaagtgaatacaatgaaaactttttgaatttcaaaatgtcattaaaataaaatcataaatagtagttatttactgtatatttagttataataacgggataagtactataaggagttgtaacgaatgactggagaacaatttactcaaattaaacgtccagtaagtagattaactgaaaaagttctaggttggttatgttgggtgatgttattagtgcttactgtcattacgatgtttatagcacttgtttcattcagtaataacacatcgattgctaatcttgaaaatacattaaacaataatgcatttatccagcaattattagctggaaatggctataatacaacacaatttgtaatatggttacaaaatggtatatgggctattatcgtttactttattgtttgtttgttgatttcatttttagctctcatatctatgaatataagaatcttgtcaggtttcttattcttaatatcagcaattgtaacgattcctttagttttacttatcgttactttaatcattccgatattattctttattattgcgatgatgctatttataagaaaagataaagttgaaatggttgcgccacaatattatgaagagtataacggaccgatttatgattatcgtgaacctgtgtatgagcgcccccaaccgaaagatgattattatgatgtgcctaaatatgaaaaagaattggataaatcaaatactgtatatgatcaagaacaggaaagagataaatatgatcaatttcctaaacgtgcagttgaaagtgaatataatcatgatgagcgcactgaggaagaaccatcagtattatccagacaggctaaatacaaacaaaaaagtactgaagaactaggtattgaagatgatggttattatgcagaacctgaagttgatccaaaagaattgaaagcacaacaaaagcgagaaaaagctgaaattaaagctaagaaaaaagaaaaacgtaaagcttataaccaacgaatgaaagaacgtaggaaaaatcaacctagcgcagttagtcaacgtcgaatgaattttgaagagcgacgtcaaatttacaacaatgatatttctgaagaacgcaattcaagtgaagttaaggacaaaaaagagcaagaataaatattgatgatacccagattagtaagcagaggtcttttgcttattaatctgggtttttatatgaggttaattatcgataacgtttaattaaagtgtttaggtgtcataattttaaatgacgatttctcattactatacacctaaattatcatcaatctgaattcagatgtttattataaaaattagatgaaaaatatgttaatatacaagtaatttaatgtgcgtatatctataggctcgtagtatacttattaaaatattaaacaaagaaaggattttaagatgaatagaaaacctgaattaatcatggcttggattgcaaatagtattagtattatttatttattagttatggggctatcctatttttctttaaaaagtggtaatgcatcacaacgtgaagaattagcgaagcaattatctcagaacggtggcaaggtttctttagatatgcttcagacaacaatgggtgcattagcaattattttattaatttcaacactttatggtatatttgcgacaatttgtattaaaggacgtagaaaattatcgattatactttttgttatcgcgataattgtaagtttgatggctcttaatttaattgcaattgtcttatgggttatcgtgatgattatgttgatttctaaaaaagaatcaaaagaaacaacacataaggacgatgagtatatttatcattaatatgttcatagcaaaagaaaaaccattaaaatgttaagttgttaattattagatacaaccaacattttaatggttttatttttaactttgtagttcttggaatgtttgaacgattaaatagacatttaaaatacttagaataataataagtgtccatgaaatgatattaacccatgttttattatagaaaggtcccatcaagtctttattactagtagccaattgtaatggtattaaacagaatggcagagcaatacttaaaaatacttgagagaatacaagtagttgctcaattttagctgcattacctttaaaaatgattaagcatacgataacaggaatgacagcaagagaacgtgtaattaaacgtcttaaccaatttggtatgtgtaatcttaaaaatccttccattacaatttgtcctgctaaagtaccagtaatcgttgaattttgacctgacgctaataatgcaactgcaaataatgtactcatgattgcacccattgttgcacctagtacaggttcagtttttaaggcgtgatataaatcatagaaaccacctaaatcgtcagcatttgagttgaaaaatagtgatgctcctaacactaataataagcaattgactacaaatgcgattgataactgaatgttcgaatctatcgtagcaaatttaatcgcttgcgctttttcttcattgttatgtcttgagtatgttctagattgtacaattgatgaatgtaagtacaaattatgaggcataattgtagcgccaataatacctaatgcaatatagagaatgccgttatttgtaatgatttcactatgtggtataaatccatttaacacagcattcaactgtggtgatgaaatatagacttcaaatataaagatgaataacactgtgaaaattaatgtaccaacaatagcttcaatttttctaaaaccatatttcattataaaaagtagtaaaaatacatcaagtacagttattagtgcaccgacgattaaaggtatgttaaataggagattaagagcaatagcactaccaataacctcagcaatatctgtagcgataattgctagttctgcaatgatccaaaagattatagcaataggtcttgataaataatgtcgtgtcatttgagctaagtccatacctgttgctattcctaatctcactgtcatgctttgaagtaacattgctgataaacttgaaataagaattacgaatagcaaagtatagccatattgggcgccaccttgcattgatgttatccagtttccgggatccatgtaaccaacagcgactaataacccaggtccaagaaatgataaaaatttctgtttatttgaactgcgatgatcgaatttaattgtattgtttatttcgtctaaacttaattgttcatttgttgaatgtcgtttattattcattttgactcacctctacttcttatggacaatataataacctaataaaatgtttaggtcaacctaaatttattttaatttttttaaaagtatgaattattatgttgaacgttcgatttaatattaagaaaaaagagcacgaaatcatggatgtgattaagtgctctattatttaaacaaagttatttatgcagaataaaatggtaagaactgatcgaaggtttcttctaaaaatgcaataaatgctttgtcactttttaatcttttatcttgtggtgtgattgcacgcgctataaagaattcaccttttttcacattgatggctctttgtatcgcttctattaaatcatcatccgttaaatctttaataaatggtttatcaggtttcatatgatctaagcaaacacgataatcatcaggtaattgttgaatagctttaaattttctttcaaaaacttttgcacgtgttgctttatcttttgcttcatgcatgattccaaacataacaaacagttgatcttcaaacataccaatttggaaatgaggtaacattttatagcctcttttgtttgttgcaaaagcaacccatgtatctttaggaggattcacacttcttctagcatgctttgctacgtgaggataaaatgtttcaccagtttgacttgtaaagaagtcactaaaatattctcctaattcacggagttgtggtcgtatgtattcgtttaaagcttccattcgtgcgtctaagccttctacgttgaacgctttgaaatctttaggtttaaatgtatattttgtcatagagtacctcctgtatagtgtttaaaaatattgtagcatatgttttatcaattgcggcttaagacgctctcattaaaattagtattttcatttttatcataagaagttatttttataaaatgttgatgtataataaagatgttaggagatgatgttatggcactttatggatttgcccaaggacttattcaagaagcaggaattagaattaaacaattgatggagcaaaatttaacaattgaaacaaagtcaaatccgaatgaccttgttacaaatgtagataaagcaacagaagatttcatttttgatacaattttagaaacatatcccaatcatcaagtattaggtgaagaagggcatggtcatgacatcgatacttccaaaggtacggtatggattgttgacccaatagacggtacattgaattttgttcatcaacaagaaaatttcgcaatttcaattggtatttatatcgatggtaaaccttatgcaggttttgtatatgatgttatggctgatgtcttatatcatgctaaagtaggggaaggtgcatatcgtggtagccaacccttgaaaccattgaatgattctaatctaagacaaagcattattgggatcaatccgaactggttaactaaaccaattttaggagaaatctttaaagaaattgttaatgattctagaagtgcaagggcatatggtagtgcagcgcttgaaatcgtttcagttgctacaggtaatttagaagcatatatgacgccaagacttcaaccatgggattttgctggcggattggttattttatatgaagtaaatggacaagcttccaatttactaggagaaccattaacaattagtggtccaaattcaatcttagttggaaatcgtggtctccatcaagaaattagcaatgattatttagagccccaccatgatgcgttaatacaattacatgaacaacgatttaaaagaaaatcaaaataattaccaaaagcgtaatatgtagtcctaacaattaggtaacatattacgcttttataccttaaataataaaaacacgcgccaatataaaaccagttaaatgttcatcatgaacatgtgtggtcttaaatcaacgcgtgttattgtcgatataacttatagccaatcgttttctcgatattttttctttgtagtaaatccaattccaaaggttgcaacgagtaatataaatgttaaaatcatcattggtacatttgatgcaccaacagcaaaactaaataatactaagaaaacaacagctaatatagaaaatacccaaaagatatttttagattttttttgtttcatcctatccccaccttttgcttatcttttctcaattatatgatataataaaaaagttgtaattaaaagtgggattttacttaagaaagaaggaaactatttatatgactaataaaagagaagatgtccgcaatatagcaattattgctcacgttgaccatggtaaaacaactttagtagatgagttgttaaaacaatctggtatattcagagaaaatgaacatgtcgatgaacgtgcaatggactctaacgatatcgaaagagagcgtggaattacgattctagccaaaaatacggctgttgattataaaggtacacgtattaatattttggatacaccaggacatgcagactttggtggagaagtagaacgtattatgaaaatggttgatggggttgtcttagtagtagatgcgtatgaaggtacaatgcctcaaacacgttttgtacttaaaaaagcgctagaacaaaacctgaaacctgttgttgttgttaataaaattgataaaccatcagcacgtccagagggtgttgtagatgaagttttagatttatttattgaattagaagcaaacgatgaacaattagaattccctgttgtttatgcttcagcagtaaatggtacagctagcttagatcctgaaaagcaagatgataatttacaatcattatatgaaacaattattgattatgtaccagctccaattgataacagtgatgagccattacaattccaagtagcattgttggactacaatgattatgttggacgtattggtattggtcgtgtattcagaggtaaaatgcgtgtcggagataatgtatcactaattaaattagacggtacagtgaaaaacttccgtgtaactaaaatctttggttactttggattaaaacgtttagaaattgaagaagcacaagctggagatttaattgctgtttcaggtatggaagacattaatgttggtgaaactgtaacaccacatgaccatcaagaagcattgccagttctacgtattgatgagcctactcttgaaatgacatttaaagttaacaattctccatttgctggccgtgaaggtgactttgtaacagcacgtcaaattcaagaacgtttaaatcaacaattagaaacagatgtatctttgaaagtttctaacacagattctccagatacatgggtagttgctggtcgcggtgaattgcatttatcaatccttattgaaaatatgcgtcgtgaaggttatgaattacaagtttcaaaaccacaagtaattattaaagaaatagatggtgtaatgtgtgaaccatttgaacgtgtgcaatgtgaagtgccacaagaaaatgcaggtgctgttattgaatcattaggtgcacgtaaaggtgaaatggttgatatgactacaactgataatggacttacacgtttaatctttaatgtaccggctcgtggtatgattggttatacgactgaatttatgtcaatgacaagaggttacggtattattaaccatacatttgaagaatttagaccacgtattaaagcacaaattggcggtcgtcgtaatggtgcattaatttcaatggatcaaggttctgcaagtacttatgccattttgggacttgaagatagaggtgtaaacttcatggaacctggtactgaagtttatgaaggtatgattgttggtgaacataatcgtgaaaatgatttaactgttaacatcactaaaacaaaacatcaaactaacgtacgttctgcaacgaaagaccaaacacaaacaatgaatagaccgcgtattctaacattggaagaagcgttacaattcattaatgatgatgaacttgttgaggttacaccagaaagtatacgtttaagaaagaaaattttaaacaaaaatgttcgtgaaaaagaagcaaagcgtatcaaacaaatgatgcaagaaaacgaataatttaacataataaaagagaagctgagcgatgaaagttgcttagcttctcttttggcatataatatttgaaaaagtgtttaaatgctattatttcctgttactttcacattttcaaatttctaacttgtttattcagatattaatcgagcggatagtgttgcgcacgttgtttaggtgtgtctaatcgacttttacaatcatcacacataaatgttcgaataggattgtttttaagtcgtttagactcagttgtgcgctcatctataaatacttttgcatcacagataatgcattgcacttgtctcaaattaaatcacctcaatatgagttacatggttgattcgatatgaataaccatcttcttgattgtaaataaaactatctacaccattatcgctgtaaagtcgtttaccgtcttttgcaaattggaaaaataaatagggtaatagatctatcggtatatctaaatgatcatgctcatttgataatcgaatagtagttgcagagtcatgtggttcggaatgtttgaaaaatggtgtcatattaatgacaaatgaaccttctaacatggcacgttttttatattttatttctgaatttaaagtaggcggattagtttgtccttctaggatagcacgattccattcatgattatcttcaaagtcgattggttttgaaccatcaaatacacctttttctaaatcttcgatgctaacttttctatcatcgaaaatccaagtcgtactatctaatgttataggaaactttacggctcctttaatttgtatcattttcccactccctatcaatgtatatagcattattttaacacaaattgctaacgacacattttaaatctacttgctttttaatatttagtaagataaacttttagtaagacttgagaatttatatagagggggagcgtgtcatggcgaaacaagcaacaatgaaaaatgcagctttgaaacaattgactaaagatgctgatgaaatcttgcatctgattaaagttcaactagataatttaacattaccttcatgcccattatatgaagaagtactagatacacaaatgtttggacttcaaaaagaagttgattttgctgttaaattaggtttagttgaccgcgaagatggcaaacaaattatgttacgtcttgagaaagaactttcaaaattacatgaagcttttacacttgtttaaggtttaatatataagcatattaaaatggcgtgagatatcgacaattgagctgcgccgattttatatttatagtttaattactgattaaagtggctgttatgttgtcttcttgatgacatgtcagtcacttttattgggttttagcaattcacgatattaagtaaacaaatattctataaattacctcaagagacctgttaatatttgtgattatgactgtgtcatgtatataataagtaacatggatttttaaaattaaagtataaaacgaaatcatttgaagtataaattgtagaattggatgactgaatatatgaagaattttagaagtattttacggtatattggtaaaacctcaaagtttattgattatccgttattagttacatatattgtattgagtttaattggattagtgatggtatatagtgcaagtatggttccagcaactaaaggcacattgactggtggtatcgatgttccaggaacgtatttttacaaccgacaattagcatatgtcataatgagttttataattgtattttttattgcatttttaatgaatgttaaattactgagtaatattaaagtgcaaaaaggtatgattataactatcgtctcactattattactgacgttagtaataggtaaagatattaatggttctaaaagttggataaacttaggatttatgaacttacaggcatctgagttattaaaaattgcaatcatattatatatcccatttatgatcagtaaaaaaatgcctagagtattaagtaaaccaaaattaattttaagtcctattgtattagcattaggttgtacgtttttagttttcctacaaaaagacgtagggcaaacattactaatattaattattttagttgcgatcattttttattcaggaattggggtaaacaaagtcctaagatttggtataccagcagtgctaggattcttagtagtatttgtcattgcattaatggctggttggttaccaagttatttaactgccagatttagtacgctaacagatccattccaattcgaatcaggaactggataccatatttccaattcattgcttgcgataggtaacggtggcgtatttggaaaaggattaggaaatagtgcaatgaaattgggctatttaccagaaccacatacagattttatttttgcaattatttgcgaagaattaggtttaatcggaggattgctagttattactttagagttctttattgtatatcgtgccttccagtttgcaaataaaacatcatcatatttttataaacttgtgtgtgttgggattgccacatactttggaagtcaaacgtttgtaaacattggcggtatttcggcaacaattccattaactggtgtgccattgccatttatcagctttggtggatcatcaatgattagtttaagtattgctatgggtttacttctgattgtaggtaaacaaatcaaagtagaccagcaacgaaagaaacaacaacaaaaagttgatataagaagacaatttaattaaaaaaatactagccaatatttagtacgagatgacttctgtcattaagcaatgctaaacattggctatttatatactctttgtcaaattggactgatgagttcaataacggaagttaggcaaccaaacaacgcttaacttcctttttgttttgatattacgagattactcatgattatcaaattttataaacaaaacaacgtataattataactaaattttatgactaaaaattactaaatgtggtggcgaaattagaatcatgatgataagataaagttatcgctattgataataaatgttgatgttttgcaattttatttttaattttttagagttgtagaaatcgaaaatgtttcacaacaaaaacgtgaactacctgttgttgcatagtcatttttgaaattattatttctgaagcggaggttttaattgtctcaagaatgttaaattttgaaaatttgaaacataactatagcaaaacagagcgctttaagataaaattttattatctaattagttagaaaattctaatagtttgaggagtgtatcgctattgaaacaaataaaaaagttacttgttgctaaccgtggagaaattgcaattcgtatattcagagcggcggcagaattagacatcagcacagttgcaatttattcgaatgaagacaaaagttcattacatagatataaagcagatgaatcctatttagttggaagtgatttaggtcctgctgaaagttatttaaatattgagcgtatcattgatgtagcaaaacaagcgaatgtggatgcgattcatcctggctatggatttttaagtgaaaatgaacaatttgcgcgtcgttgtgcagaagaaggaattaaatttattggtcctcatttagaacatttagatatgtttggagataaagttaaagctcgtacaacggctatcaaggcagatttaccagttattcctggtacagacggtccaattaaatcatatgaattagcaaaagaatttgcagaagaagctggtttcccgctaatgattaaagccacaagtggtggcggcggtaaaggtatgagaatcgttcgtgaagaaagtgaattagaagatgctttccatagagcaaaatcagaagctgaaaaatcatttggtaatagtgaagtttacatagaaagatacattgataatccaaagcatattgaagtacaagtcataggtgacgaacatggaaatatcgtacacttatttgaacgtgattgttcagtacaacgtcgtcatcaaaaagttgtagaagttgcaccatcagttggattatcatcaacattacgtcaacgtatttgtgatgctgcaattcaattgatggaaaatattaaatatgtcaatgcaggtactgttgaatttctagtatctggtgacgaattcttctttatagaagttaaccctcgtgtacaagtagagcatacaattacagagatggtaacaggaattgatattgttaagacacaaattttagttgcagcaggtgccgatttatttggtgaagagattaatatgccgcaacaaaaagatattacaacattaggctatgccatccaatgtcgtattacaacagaagatccgttaaatgatttcatgccggatactggaacaatcattgcttatcgttcaagcgggggctttggtgtacgtcttgatgctggagatggtttccaaggtgctgagatatcaccttattatgattcattactcgtaaaattatctacacacgcgatatcatttaaacaagcagaagaaaaaatggtacgctcattacgagaaatgcgtattcgtggtgttaaaactaatattccattcttaattaatgtaatgaagaataaaaagttcacaagtggtgattacacaactaaatttattgaagaaacaccagaacttttcaacattcagccgtctctagatagaggtactaaaacattagaatatataggtaatgtaacaattaatggtttcccaaatgttgagaaacgtccgaaaccagactatgaattagcatcaattccaactgtatcttcaagtaaaatcgcttcatttagtggtacgaaacaattgcttgatgaagtaggtccaaaaggtgtagctgaatgggttaaaaagcaggatgatgtcttactaacagatacaacctttagagatgcacaccaatcattattagctacacgagttagaactaaggatatgattaatatcgcatccaaaacagcggacgtatttaaagatggtttctcactagaaatgtggggcggtgctacatttgatgtggcatataatttcttgaaggaaaacccatgggaacgacttgaacgtctacgtaaagctattccaaatgtattattccaaatgttgttacgtgcttcaaacgcagttggttataaaaactatcctgataatgttattcataaattcgtacaagaaagtgctaaagcaggcatagatgtctttagaattttcgattcattaaactgggtagatcaaatgaaagttgccaatgaagcagtacaagaagcgggcaaaatctcagaaggtactatttgttatacaggtgacattttaaatcctgagcgatcaaacatttatactttagagtattatgtcaaactagctaaagagttagaacgtgaaggtttccatattttagcgattaaagatatggcaggcttattaaaacctaaagccgcttacgaattgattggtgagttaaaatcagctgtagatttaccaattcatcttcacactcatgatacaagtggtaatggtttattaacatacaaacaagcaatagatgctggtgtcgatatcattgatactgctgttgcttcaatgagtggtttaacaagtcagccaagcgccaattcgttatattatgcattaaatggcttcccacgccaccttagaactgatattgaaggtatggagtcacttagtcattattggtcaactgtacgtacttattattcagactttgaaagtgatatcaaatcaccgaatactgaaatttatcaacatgaaatgcctggtggacagtattcgaatttaagtcaacaagctaaaagtttaggtttaggcgaaagatttgatgaagtcaaagatatgtatcgcagagtgaatttcttatttggtgatatcgtaaaagtaacaccatcgtctaaagtagttggtgatatggcactttatatggtacaaaatgatcttgatgaacaatccgtgattacagatggctataaattagatttcccagaatcagtagtgtcgttcttcaaaggtgaaataggacaacctgtaaatggttttaataaagatttacaagcggttattttaaaaggccaagaagcactaacagctcgtccaggtgaatatctagagccagttgattttgaaaaagtccgtgagttgcttgaagaagagcaacaaggtcctgttacggagcaagatattattagttatgtactatatccaaaagtatatgaacaatatattcaaactagaaatcaatacggaaacttatcgttacttgatacgcctacattcttctttggaatgcgtaatggtgaaacagtagaaatcgaaatcgataaaggtaaacgattaattattaaactagaaacgattagtgaaccagatgaaaatggtaatagaacgatttactatgcgatgaatggtcaagcgagacgtatttacattaaagatgaaaatgtgcatacaaatgcgaacgttaagccaaaagcagataagagtaatccaagtcatatcggtgctcaaatgccaggttcagtaactgaagtcaaggttagtgtaggtgaaactgtgaaagctaatcagccgttgctaattactgaagctatgaaaatggaaacaacaattcaagcaccatttgacggtgtgattaaacaagtaactgtaaataatggtgacacaatagcgacaggcgatttattaatcgaaattgaaaaagcaactgactaaaatgattaaaataaaacgagattacacaacaattgacgtgtaatctcgtttttacatggcttaggtttaattttaaatattgatataaaaaaccgtaattttaatgggcgtgccattaaaattacggtttgcttttttgttattgcttgtcacttcttactgatcgtaacattagcatgataaagtatgttgtcataccaaataaataagtgataaataatgcatggaaaagtgcgattatcaggttaacatttgtcataatagataatgcacctgtgataacttgtaatataacaagtataaatgcagctgtataaccataatgaacagtacggttatttggataatttttaacagcgtgaatataagtaatcataataatcgtaaacactataaaagccatgatacgatgcgtgagttgaacccaatcttgttctgaatgtggtacaagatcgtggaatggcaatggccaaccaccatatgctaaacttgcatccgcatgtctcactagtgcaccagtataaacaccacaataaatgatgattgccattaaccatgttaaacgtcttaatggctttttgatatataattcgtcagcttcatatttttgatctatagagaaaataatcaatgttattaaaaatacagatgagaaactgattaatgatataccaaagtgcaatgctaaaacgtaatcgttttgttgccaaataacagcagcagctccgattaatgcttgcaataataagaatccaacactaatgattgataaaggtttaatttctttaatatagcctatatgtttccatgcagtgataactaaccataagaccattaataaagacaaagctgaaacggctctatgacttaactcaataatcgtatcaataggaaagaattctggaatcaacgcaccatgacatagtggccaagaagaaccacaaccatcagctgatccggttttggtaactaaggctccaccaagttgtacaaatgtcatcattaacgttgctacgacacctaaccattttaaattctttttgccaaacaatttatacaccccatcataaaaaaacgcatcactgagaattagaattaatagccggatttgagatgatactataaatagacctgattgtaggatatgaaaagatgggatccaacgcaggaaatatgatttaattttacaagtattgtatgtggacgacataaaaagaacttaatcgtaatgatttttttattgggataattatgtaatccacgtttactcaaatttgaagcttaaatattaatctcttttagatgcatgattctacttattaaaattttctaacatatacattatagcaataaattaaatgttatttgtgtcacaaaattgacattttctcttgtcgttaatttgtcacaatttaattttattaaacctagtctttttatgcaatctaagatatcataatcttatatgaacaaatttaaggagggggattatgagcaaagagcatactttgtcacaaaatattagcagagttaacttcaaagaattgcaacagataattaaaatgggacttgttcaaggtaacttaattccggcttttgcgggcgcatggctagcagttgtaatgacaaatcattccttcttatcatcaatacctcaaattttattaatgctatttggatctactttaattatgggtggcgcatgtgcgttaaataattattacgaccaagatattgatcgtattatgcctagtaaacaaaatagaccaactgtaaataatagaattacagatcaaaatttattactattaagttttggtatgatgttagttggagaaatttgtttgtttttattgaatataccatcaggcgtacttggtcttatggggattgtaggttatgtgtcttattactcaatatggtctaaaagacatacaacatggaacacagtgattgggagttttcctggagcagtaccaccactaattggatgggttgcaattgaaggacaaattagtttaacagcgattgcgctgtttttagttgtattttgttggcaaccaattcatttttatgccttagctattaaacgtaaagatgaatatgcacttgcaaatattccaatgttaccatcagttaagggctttaaacgtacacgtgtcagtatgtttatctggttgattattttattgccagtacctttattactaataaatttaggtgtcgtattcgtagtgttagctacattattaaatttaggatggattgcattaggtttaacaacatttaagaaaaattcagatcaaacaaaatgggcaacacaaatgtttatatattcactaaattatttagtgatctttttcgtgttagctgtgattgtttcattacttactttgatctagattaattaagttaggatgaaaaatatgggcgttccaattttaccaacgattagtacgacatgtattgtcattagtgcaattttaattgccattggttggagacttatttggaaaagggaaataaataaacacaaaaatgttatgttagctgcagctgtttttgctttaacttttttcttaatctatgcaagtagaacgatttttatcggtaatacagcatttggcggaccagcatcaattaagaaatattatacgattttcttatttttccacattaatttagcaacaattggtggtattctaggcctagttcaaattattactgcatttaaagataaatataatgtacaccgcaaattcgggccattcgcttcagttatatggttctgtactgcaattacaggtgtagcagtttacttattattatatgtattatatccaggtggagaaacgacatcactgattaaagcaacatttggtcattaatatgcttatacaaatgatactaatctgataaggcaatttgttttatcaggttttttgatgaagaatagtcggacagttgatggtattcatttgataccttaactgtccatttttttatacatattttaatcttaataatgaaattcaacctgaaaacataaagataggttatgatatagagtgtagggaaaatctttatgacgttaaaattatgcctgaagatgattttgttttatcgaaacgacacagttatgtcagtgttgaaaatttgctaattaatgtgttgttttttacaatagtattaatactttttaggtggttgattgatgaaaaagttaattataagagtcgtcggtgtattatttttagttggatttttaatatatcttttttattcaccgagattaaaatttgatgtattagagaacccgaataaaggtaataaagtaaatagatctgaacaggtgaataaatcaaataaccatgctgaaaatccaaagcctaaagaaggtgttggtacatgggtaggtaaagatattaaagtgcttacttctaaatttggacaagcagatcgtgtctacccttttagagatggttacaaaaattatgtgtttaaagacaaaaacagttattacattgtttcaactaaacgtgaagaaatcgtttcagtgtatgctacaggtgagaaagtcaatgttagtccgttaaaaataggacaacattctgcagaaatttttaatcatacaagtattaatccagaaccgtcctttaaagttgatggtaaaaaatatgaatttgaactttcagatgaagatttaaaaacacaaacactgattaaatatggcgacatatatgcacaagtgtattctgatcaacaatcgaaaaaggtgctaagtgtacgatttttaacaaaagaaatgttagcagatattgaaccttatcaattaaattctaattctacgtcagaagagcataataagcgtccagttgagcaaaatccaaatcaattaatttctctttatgaagtaacgaatgaaatgagaaaattaaaaggattaaaaccattgaaaatcaatagcgatttagcacatattgcatctaataacttatatgaagcgacctctaatggttctgatagtgttgaatttacagaggacgcattaagagggcaattagataaaaatcacgttacttataaaacaactgctcaaaatgttggttatgcgtttaatgatgtaccaacattaatccatagttggatgaattcagatatacatcgatctcgtctattaaattcaaaatacgatgagatgggtggagatgtaatgagagattattattcactaattttcttagaaaaataacaatgaggggtatttatgattaatgaagcttcactagcgatattagatgatattgatgaactagctgatatgatagttgcatcagatatttatgcatcatttgagcaagctaaacaggcgctcgaaaacaatgacgaagcacatttactttatcaatcatttttaaaatcaaaagagaaatatgatgaagtaatgcgattcgggaaatatcatcctgattataagaaagttatgttagagacaagacaacgcaaaagagcatatgagatgcttgacgttgtgatgcattacaaagctagggaaatggcacttcaacatttaatagatgaagttgttacgaaaattgcgtacgctgtttcagaacatgtcaaaatagaaacaggtaatccattctttcaaacatcacatagtggttgtgcgacgggcggatcctgtaattgttcattataaaaaacatcgagtcagaaaaaggtggttattgaaaccactaactagcatctgactcgatgtttttatttattcgggattgtttgtttgaattgttgtgctaaatctggtcgatctgtcacaatcgtgtgtgcacctttttggtataaatcattcatcagatttatactatttacgccataatagcctggaatgatattcatatcatttaaccatttgataaaacgagatgaagtcaaatcaatgcctttaaaatgagtaggcatttggaacgtttgtgctaatggttggtagtacctaccacctaataaatgatattttaaaaatgcttctgtaacttcctgttggctagcaccaattgcgacggatccttgtgcaattttattaaaacgaacgatttgttctttataaaaacttgtcacaagaacgcggtcaaatgcttgattttctgcaattgtatcaaacataatttgtggtgcgattgagccttcataggattcaggagcatcttttaagtctacgtttatatacatatcaggatattgcttcagcaactcatcgaaggttagtatagctgtgtgtgcatgaccacgatatggtgttagtccattgatatctttgaagtgataagctgcgtctaatttctttaattctgctaatgtatgggcactaacttttccagagccgttcgtcgttctatcaacagttgcgtcatgaaaaacgataagctgttgatcttttgtgagtctcacatctgtttcaaagccatcaacgcctaattgtttagcatagtcaaatgcaagttgcgtttgctctggtcttaaagccataccaccgcgatgcgcaaatatatatggtgcattgcctttgaaaaaagcagggatggtttgctttttagtaatcactttatttttattgatcattaatagactacttaaaaatccagcaccgactagtaccgcatttaaaatgtttctgtttacttttttcataaaaaattcctcctcgtttacttttatagcttaacaaattcatagttctgactacagcgaaatgtgtggttaatcatatagtgatgctcttgagaattgaattaatataatgatgtttaatataatctaaatacatttatcgagcaattacataagacataattaaggtagcttaatattttaaaattaataaagacatgatatgattaatgctgaaaataaatggagtgaggtttaaatgaatttaatcccaagaactagtattgtagtttatttaaaacatatgaaacatgaacgacaaatccgaaaatatggacatatcgttcattcaaatagagatcgtaaatttgtaattatgtatgtgaatgagcaagatgttgatcaaattgtacataaactaatgcaacttaaatacgttagacacattgatggctcaccatataaatacttaaagaaaacttacgaaaaagagaaacacgaaatatataattaatattattgaagttctggtatccatttttggagccttaacacactaattaaataattataatataacgataaatcatgaaatgcttgagggggctgtacatcgatacctaaaattggtatgtcgaatttttcagcacaatcatttatcatttgaaactttttatttgaatctggatatggatatttaatagcgtttatcatgatataaaatgcttggaaatgattgccagttgtagggttcataatgattgctacagatgactttttattttcagcttgtggtgaatgaaaatagataattttatcaatacgttgatggttatattcaatcatcgtcatgaattcgaacaaatctgttagaccttcaccaagtgtaataaatgtttgtttcattggtttatcattctcctttttctcaataaattatattaaataactaaatgaattggaagtgtgaacaacatgcgcgtcattgcaggtaaacataaaagtaaagctttagaaagtatggaaggccgtaatacgagaccaactatggataaagttaaagaaggtatctttaatagtttatatgatgtgtcaggtataggtttagatttatttgcaggaagcggggcgcttggaatagaagcactctctcgaggtatggataaggtaatctttgttgatcaaaattttaaagctgtaaaagttattaaatcaaatcttgcgaatttggatttagaggcacaatctgaagtttataaaaataatgcagatagagctttaaaagcattgtcaaaacgtgatattcaatttgatgtcattttcttagatccaccttataataaaggtctcattgataaagctttaaaactaatttcagagtttaatttattgaaagaaaatggtatcatcgtttgtgaatttagcaatcatgaagaaatagattatcaaccgtttaatatgattaaacgttaccattatgggttgacagacacattgttattagaaaagggagaatagcatggaacatacaatagcggtcattccgggtagttttgaccccattacttatggtcatttagacattattgagagaagtacagatagatttgatgaaattcatgtctgtgttcttaaaaatagtaaaaaagaaggtacgtttagtttagaagagcgtatggatttaattgaacaatctgttaaacatttacctaatgtcaaggttcatcaatttagtggtttactagtcgattattgtgaacaagtaggagctaaaacaatcatacgtggtttaagagcagtcagtgattttgaatatgaattacgcttaacttcaatgaataaaaagttgaacaatgaaattgaaacgttatatatgatgtctagtactaattattcatttataagttcaagtattgttaaagaagttgcagcttatcgagcagatatttctgaattcgttccaccttatgttgaaaaggcattgaagaagaaatttaagtaataaaaataacagtattttaggtttatcatggtttacaatcctaaaatactgttttcatttgttaacgatattgctgtatgacaggcgtgttgaaatctgtttgttgttgcccgcttattgcattgtatatgtgtgttgctttgatttcatttgtgaagtaatgtgcattgcttttgttaatattggttatatattgtctttctgggaacgctgtttttaaatgctttaaatattgtctgccacggtcgttcatcgctaatactttaactgcgtgaatgttactcgtaacatctgtaggtttaatgtttaataatacattcattaacagtctttggatatgcgtatatgtataacgctttgtttttagtaattttacaaaatgatgaaaatcagttgcttcataaatgttagatttcaaacgattttcaaaaccttcagtaacagtataaatattttttaatgaatctgtagtcatagctatgatttgatatttcaaatatggaaatatttgatttaatgttatatgaggtgttacgtacaagtgttgaatatctttaggtaccacatgatgccaatgatcatcttgactaatgattgatgttctaatagatgtaccacttgcaaactgatggtgttgaattaatgaatcatgatgttgagcattttctcgtttgatagaaattgcattgatgtttttagcatttttagcaattgctttcaggtaactaataccaagtatgttgttaggacttgctagtgcttcatgatgctctaataattcgctaatgatacgagggtagcttttaccttcttttactttttgtgaaaaggattcagattgttcaatttcattaatgctgtgtgctaattgctttaatgttttgatatcattattttcactaccaaatgcaattgtatcgacactcatataatctgcgactttaactgctagttcggcaaaatgatcgccagatgataaactggcagttgctggtagttcgataactaaatcagctgttgataatgccatttttgcacgagtaaacttattatagattgctggttcgccacgcatgacaaagttaccactcattattgcaatagtaacgtcagcatttgtaagttttttagattgattaatatgatattgatgcccattatgaaagggattatattctgtgattaagccaacgcttttcatttgcaattcgtcctttcggtattcattattaatattgtaacagaacatgatatgttaagaaaaaatcttgacaacttgttcttagaaagttaaaataaattttgtgcttgttagaggtgaagccatatgaaatggtcaattacgcaattaaggaaatatcaaggtaagccatttgaatttgatcaaacggtgagttttgacaatttaaaagaatcattagatttaattgatttatctccaattacaatccaaggtcagttaaccattaagtcaacagaagtcgttgcggatattcacattactggaacgtatacaatgccttgtgcacgtactcttgtaccagtaaaagtcccactagatgtaactactacagaagtatttgatttagaagggtacaatcagtataacgatgatcaagatgatgtagatgaacactatcacattattaaagatggtatggttaatcttcaggatattgtcgaggatatagttattattgagaaaccaatgagagcttattcagagcaaagtgaccaaatgttgacagtaggtaatggttgggaagtaatcgatgaggatcaattagatgagcttgctaaacagcaagaacaagatgattcagaatcacgacaagttgatccaaggcttcaaaaattacaacaattatatgataaagagcaataagtagtttaattaatgatataatgttgttaattaaactaacatttagtatttttcgtttataatctaaggaggatatatcatggcagtaccaaaaagaagaacttctaaaactagaaaaaacaaacgtcgtacgcatttcaaaatttcagtaccaggtatgactgaatgcccaaactgtggcgaatacaaattatcacaccgtgtatgtaaaaactgtggttcttacaatggcgaagaagtagcagctaaataattttagttactcaatataaaaagtcccgcttaaaatgattgttttaagtgggactttttatattgcgaaaaataattggcgaacgaggtaactggatacctcatccgccaattaaaatttgttaatttaataattaaatataaagacgatttattagtttttacgttttctaggtaatacgaatgcaacgatgctacttaaagctaataatgccattaatggtaatgtcatatctttatttgattcttcaccagtttgtggtaatgattttgctttattttcttgtgtatttttattgttttggctttgagtgtgtccatcatttgtgtttttaatgtttgctttttgtaatggagcactatcttttgcttcgctagaacctgctgaagtttgaacaacatcttttgttgtttttgatgaagcagttgttggttttgcaacattttgagtcgtagatactaccttagttggagttgtactacttgattctacttcacctttagttggttttgtagcaggcgttttgtctttacctgactcactagatgcgtcattttctttttcaacacttggtaattgtttattgtcatctttttggctgtcttgtttttgtgattctttttcaacaggtgatggtgttggtttgctaggcgtagctggagtagcttccttcttagctgagttatcttgttgttcttttttgttagatttatcggtattggcttttgtaaatgcttctttatcaacgattctgacatggtattgtccatcataatcaatcgtttttacgtgaactttaacgatagcatcatatagagttttaccttcaacatatgggaaaataattgttctagtattatttttagcatctttgcttatagttctaacacgttgaccttcaaccatgaaatctttccagtaatcgtcattagtagtttccatgaccatatattttttgccgttaagcatacctgttttaatagggtgtttaacaaaagtatccatcatagattcgttattctcaacactttcataaacaacatattttgtatcttgtaaatcagtcattttttcatttgttggttgtacattttggaattcagtaatagctgatttcacttgctcatctaaagctttctttgtatcctctaatttcttcttgtactcagcctttaatttttcaggaagtttatcttgaattttatttaattcataaacttgtctttctagtgttttcgcttttttatatggcgctaataatttttcagctttataatcttcttcagttttgaatttatctgcactgttataaattggttgtgcgaattccattaatgtgtaatcgtatttttcttctttgttattgaagtgtgttgaactaacaattttaacagcttttgttccgtttgatacagagaagcgaatgtaagcataatctttaacagtatcgtatgatactaatttaattggcaactttttgtcaccttcataaacttcaaattttctccaaaattgacctgattgtaatcctaattcaatttctggttttgaatcagtgaaaataactctagcaggtttaacagaacttgcataatgataaaactgttgagttccatctttctttttcatttcaaaatcaattggacgagagtttggtgcgctatgatctttgtcttttattgcagggtttttaatcgcttctctaagttcctgattcaaaataggatatgtattgttagtggcttttgctgctggtttaacttcttttgtttccttaggggctttaacttctttaacttctttagcttcttttgtttcagaagtaggggcctcaacttctttattagatactgagacagcattagctactggtttagtttctggagctttttcagatgttgttgttggacttgcaactgcttcagtttttggttgtgcttctgtatttgtaccacctgtttcttcagctgctgcttgtgcttcgccatttgacattaataataaaagtgtactaattgctacagatgcaacgcctagtgatgactttctaattgaataaaatgatttaaattctttttgctgtttgttcatgttgtagaaacaactcctaattgtatattatcaactgataatcattatcaattgattacttgtattgtacattgaaatgttagttaattgcaacgttattttataaaaaaataacctatgttatagattatgaaatatctatgacataggttaaataaaatttaaaataaaaaatatattaagttatgagtgtgacgatgatttatttagattcttttcttttgaaaagtaataaagataatgaacctaaaagggcaagtgttgcgaaggcaactgtgctaataaagttatcaactgaagttaaaccagtttttggtaattctttagctttagatgcttgtttaggcgtttcgttatgttttgtaactttgttagtttgttgtgatttattatcacttacagcttgattgttgctttcagatttcgctgttgcaacatctttaacaggtgtttgaactttattttgttcttgagcagtttgtgctgttttaactgtatgagcagtttgtgttttagtttgatcttttgttgtgtcagtacttacaactttagtagagtgattgtcttcaactttgcttgttgtagttacagtaggtttaactttttcaactttaggttgaactggtttagtttgctcagtaggtgttttaggttgagctggttttggttgaaccggtttaacattgtttggttttgctgcgtcagctaatgtaggaattgctttttcaaattccaaatgcgtagtatatctatgattgtaattaatttgtggcacgacaatatgtactttagtagttaagctcttatatccaggttcaactgcaacattgattgttctagtatccgcttttttattatcgttaacaacagttgttgctaattcttgattgtttgcattgtaaaatttgtattctttccagaatgatgcattgtttaacacggtttggaaataatatttattattttgtttaattactttaccagggtgttgcatatagtcatccatgtgtgacttctctgaagagccatctttttgcacttggaaattaattggttgtgatgttgcttgagaaacttgtgtgctttgattattagttgcgttcgtagcttctgttgccgcattgacttgttggctgtctgcgcctatgtatacaagggaacctaaaatgatagatgctgtacccattgtaatctttttcatagctgatgaacgttgttctgattgatacttactgtttaaataatgttttgtcatgttgttttcctcctaaggatacaaattatgtgttgttatatgagatgattaaccattgcaattgataatggttatcaattatactagcacatctattttcgtataacaataataaattgattataaaataaatattgacaatgataatcattattatttatgattttactaaagacttaaaagcaatcataaaaaggaggattatgttttgaaaaatattttaaaagtttttaatacaacgattttagcgttaattatcatcatcgcgacattcagtaattctgcaaatgccgcagatagcggtactttgaattatgaggtttacaaatacaataccaatgacacgtcaattgctaatgactattttaataaaccggcaaagtacattaagaaaaatggtaaattgtatgttcaaataactgtcaaccacagtcattggattactggaatgagtatcgaaggacataaagaaaatattattagtaaaaacactgccaaagatgaacgcacttctgaatttgaagtaagtaagttgaacggtaaaatagatggaaaaattgacgtttatatcgatgaaaaagtaaatggaaagccattcaaatatgaccatcattacaacattacatataaatttaatggaccaactgatgtagcaggtgctaatgcaccaggtaaagatgataaaaattctgcttcaggtagtgacaaaggatctgatggaacgactactggtcaaagtgaatctaatagttcgaataaagacaaagtagaaaatccacaaacaaatgctggtacacctgcatatatatatgcaataccagttgcatccttagcattattaatcgcaatcacattgtttgttagaaaaaaatctaaaggcaatgtggaataatgagaaatgttaaacaaattgctacaaaatctattatagctattattagcttaggtatacttacatatacaacaatgattggtagcgtgttggctgatgagataaaatatccatcagccaaatttaatcaacctgaagcaaaagataaaacagaattaactacatcaatttttgatgaaaagataaaagagaataaagcgttagagttactaatttttaatcaagaaaataaaaatgtaactgaggaacaacaactagttgacgaaaaggcgcaattgatttcagatatgactggtaaaatttacttgcaagtaaagctaaaaggtcaaatagataaagaacaacttgtttttcaaaatgacaaaaatgaagaatttccttttgttataaaagatgaaaaggatgacacaatagtaagaattttaattgaacagcatatggataaaatcaatatgcatgttaaaacgttggctgaaaagaaaaatctagataacaaagaaatggtgtattctattcattttaaagagaaaaaagtacaacatgatgatgcaaaagaagtgccttcaaaacatcaaaatcaagaaaataatcaagatcagcttaaaaaagatattgatgacaaaaaagatagtcaaaaatcagatactaaggaaagacgtactagcctttttactgaaaaaggattaaatgatattcctgtacaaaaagataaagtgcaacaagacagtaataaaaagattgaaaatgagcgacctaaagcatcaggtacattaaaagttgaaaatagccctccaacaataaaaaaggttgaaaataatcacaaagagcaaccgaaacataaagatgaaaaatcaaaaaaggaaaagaaaaaagtagttgaaaaagaaaaagcgttaccagcttttaatagagatgatgatagcaagaatagtagtcaattatctagtgatattaaagaacttgatgaaccaaatcataaaaagcaatatatgttatttgcagctggcattgtgttagcaactattttacttatttcggcacatttatacagcagaaagagaggtaaccaagtttgagaatcataaagtatttaaccattttagtgataagcgtcgttatcttaaccagctgtcaatcttccagttctcaagaatcaactaaatccggcgaattcagaatcgtaccaacaactgttgcattgacaatgacattggacaaattggatttaccaattgtcggcaaacccacgtcatataagacattgcctaatcgttataaagatgtaccggaaattggtcaaccaatggagccgaatgttgaagctgttaaaaagttaaaaccaacacatgttttgagtgtgtcaacgattaaagatgaaatgcaaccattttacaaacaattaaatatgaaaggctacttttatgattttgatagtttaaaagggatgcaaaagtcgattacacaattaggtgatcaatttaatcgtaaagcacaagcaaaagaattaaatgaccatttaaattctgtaaagcaaaaaattgaaaataaagcagctaaacaaaagaaacatcccaaagtattaatattaatgggtgtaccgggtagctatttagtagcaactgataaatcatatattggtgatttagttaaaatagcaggtggagaaaatgttattaaagtgaaagatcgtcaatatatttcgtctaatactgaaaatttgttgaatatcaatccagatattattttacgattaccacacggaatgcctgaagaagttaagaaaatgtttcaaaaagaatttaaacaaaatgatatttggaaacattttaaagctgtgaaaaataatcatgtttatgacttagaggaagtgccattcggtattacagcaaatgttgatgctgataaggcaatgactcaattatatgatttattttataaggataaaaaatagtgagttgatatgatgataaaaaataaaaagaaactactatttttatgtttgttagtcattttaatcgcaactgcttatatttcgtttgtaaccggtacaattaaattgtcatttaatgacctatttacaaaatttacaactggtagcaatgaagcagtggattcaatcattgatttgcgattgccacgtatattaattgcattgatggttggcgcaatgttagcagtttctggagcattattacaagcagcactacaaaatcctttggcagaggcgaatatcattggcgtttcctcaggtgcacttataatgagagcactttgtatgttgtttattccacaattgtacttttacttaccattattaagttttattggaggtttaataccatttttaataattatattgttgcattctaaatttagattcaatgctgtaagtatgatattagtaggtgttgcgttattcgtattattaaatggtgttttagaaattttaactcaaaaccctttaatgaaaattcctcaaggcttaacaatgaaaatatggagcgacgtatacatattagcagtatcagcattattgggattaatattaacattactattgtcccctaaattgaatttactaaatttagacgacatacaagcgcgaagtatcggttttaatattgatcgttacagatggttaacaggtttattagcagtatttttagcaagtgcaactgttgcgattgttggacaactagcctttttaggtattattgtgccacatgtggttagaaagctagttgggggcaattacagagtacttattccgttttctacagttattggtgcatggctattgttagtggctgatttattaggacgagtgatacagcctcctttagaaattccagccaatgctattttaatgattgtcggtggtccaatgctaatttacttaatttgtcaaagtcaacgaaatcgaatctaaaacggtacaacaactggtttagtgatgactgaagaaacgtcgttaataaaagaggatttttatgagaatgaagcgatttttaactattgtacaaattttattggttgtaattattatcatttttggttacaaaattgttcaaacatatattgaagacaagcaagaacgcgcaaattatgagaaattacaacaaaaatttcaaatgctgatgagcaaacatcaagaacatgtgagaccacaatttgaatcacttgaaaaaataaataaagacattgttggatggataaaattatcaggaacatcattaaattatccagtactacaaggtaagacaaatcacgattatttaaatttagattttgagcgagaacatcgacgtaaaggtagtatttttatggattttagaaatgaattgaagaatttaaatcataatactattttatacgggcaccatgtcggtgataatacgatgtttgatgtgttagaagattatttaaagcaatcgttttatgaaaaacacaagataattgaatttgacaataaatatggtaaatatcaattgcaagtatttagtgcatataaaactactactaaagataattacatacgtacagattttgaaaatgatcaagattatcaacaatttttagatgagacaaaacgtaaatctgtaattaattcagatgttaatgtaacggtaaaagatagaataatgactttatcaacgtgcgaagatgcatatagtgaaacgacgaaaagaattgttgttgtcgcaaaaataattaaggtaagttaaacagaaaagaggataattatgaaatttatggcagaaaataggctgacgttaacaaaaggaacagcaaaagatattatagaacgattttacacgagacatgggattgaaacattagaaggctttgatggcatgtttgttacacaaactttagaacaagaagattttgatgaagtgaaaattttaacagtttggaaatcaaagcaagcttttacggattggttaaaatctgatgtctttaaagcagcgcataaacatgttagaagtaaaaatgaagatgaaagtagcccgattataaataacaaagtaattacatatgatataggctatagttacatgaaataattgaatttaaagaggttgcagtacttgttatgacaattggtattgttagcttttgtaacgaccatacatgataccgatgatggtcgtttttttaatgaacacaaacatgctaacaacaaattgctaaaacatagtttgatttgaatgtgctttgaaaataatcatcaattatatcattttgatttattttgaagaagaaaagaattaataatgatattttggggcgtatgatttatagtagtagtatcgataaaagaaatttatacaatttgaaatattatgagtgataaaagcgattaattaatattaactatacaatcaaatgttttcatcttattaatgattaatatttttatttttaaaaataaagcgaggagctatcaatggaacaaattacttctgcacaaaataatagaattaaacaagcgaacaagctaaaaaagaaacgtgagagggataaaactggattagctttaattgaaggtgtgcatttaattgaagaagcttatcaaagtggaattgtaattacacaattatttgcaattgaaccggcaagattagatcagcaaattatcgcatacgcgcaagaagtttttgaaataaacatgaaagttgctgaatctttatcaggtacagtgacaccacaagggtttttcgcaatcattgagaagccgcattatgatatttctaaagcacaacaagtattgctcatcgatcgtgttcaagatcctggaaatttaggcacattaattagaactgcggatgctgctggaatggatgctgtaataatggagaagggtacgacagatccttatcaagataaagtgttgcgagcgagtcaaggtagtgttttccatttgccagttatgacacaagatctcgatacgtttattactcaatttaatggtcctgtttatggtacagcacttgaaaacgcagtggcatacaaagaagttacttcaagtgattcttttgcattactattaggtaatgagggagaaggtgttaatcctgaattattagcacatactacacaaaatttaatcatacctatttatggtaaagctgaaagtttaaatgtagcgattgcaggtagtattttactttatcatttgaaaggttgaccgtgttgaaagttttccgatataattataattaattgtttaacagaacatttctacgtgaatgcatacacaattgaatataaaccaataaaaaggcatggacatttatataaataattgttttagggagaataatcgtgactgcaagttattccaattatttaaagtcttttcacctttttggttacttaaagagatttaagtcggaaagacaatccgttatcaatattaaacaagtgtatgcttaggcataaatttgggtggtaccacggaaatgactttcgtcccttattttttaagaggatgaaagtctttttttagttaaacaacaaatatgataaatagaaaatgaatagttcgaatagggaggtcagtgacatatgtctgaacaacaaacaatgtcagagttaaaacaacaagcgcttgtagatattaatgaagcaaatgatgaacgtgcactgcaagaagttaaagtgaaatacttaggtaaaaaagggtcagttagcggactaatgaaattgatgaaggatttgccgaatgaagataaacctgcgtttggtcaaaaagtgaatgaattgcgtcaaacaattcaaaatgaattagatgaaagacaacagatgttagttaaagaaaaattaaataagcaattggctgaagaaacaattgatgtatcattaccaggtcgtcatattgaaatcggttcaaagcatccattaacacgtacaatagaagaaattgaagacttattcttaggtttaggttatgaaattgtgaatggatatgaagttgaacaagatcattataacttcgaaatgctgaatttacctaaatcacaccctgcacgtgatatgcaagatagtttctatattacggatgaaattttattacgtacgcatacatcaccagtgcaggcacgtacgatggaatcacgtcatggtcaaggtccagttaaaattatttgccctggtaaagtgtatcgtcgtgactctgatgatgcgacacatagtcatcaatttacacaaatcgaaggattagttgttgataaaaacgttaaaatgagtgatttgaaaggtactttagaattgttagctaagaaattatttggtgctgatcgtgaaattcgtttacgtccaagttacttcccattcactgaaccttctgtagaagttgatgtgtcatgttttaaatgtaaaggaaaaggttgtaatgtgtgtaaacacacaggatggattgaaattttaggtgctggaatggtacatcctaatgtattagaaatggctggttttgattcttcagagtactctggatttgcatttggtatgggaccagaccgtattgcaatgttgaaatatggtatagaagatattcgtcatttctatactaatgatgtgagatttttagatcaatttaaagcggtagaagatagaggtgacatgtaatgttgatatcaaatgaatggttgaaagaatatgtaacaatcgatgattctgtaagtaatttggcagaacgtattacgcgcacaggtattgaagtggatgatttaattgactacacaaaagatatcaaaaatttagttgtcggcttcgttaagtcaaaagagaaacatcctgatgctgataaattaaatgtttgccaagttgatatcggagaagacgaacctgtacaaatcgtttgtggtgcaccgaacgttgatgcaggacaatatgtcattgttgctaaagtaggtggcagattgcctggtggtattaaaattaagcgtgccaaattacgcggtgaacgttcagaaggtatgatttgttcgttacaagaaattggtatttcaagtaactatataccgaaaagttttgaatcaggcatttatgtatttagtgaagcccaagttccaggaacagatgccttacaagctttatatttagatgatcaagtaatggaatttgatttaacgccgaatcgtgcagatgctttaagtatgataggtactgcttatgaagttgcagcattatataatacaaaaatgactaagccagagacaacatcaaatgagcttgatttatctgcaaatgatgaactgactgtgacaattgaaaatgaagataaagtaccatattatagtgcacgtgttgttcacgacgtgacaattgaaccctcgccaatttggatgcaagcacgcttaataaaagcgggtatacgtcctattaataatgttgttgacatttcaaattatgtgttattagaatacggtcaaccattgcacatgtttgatcaagatgcgattggttcacaacaaattgttgttcgtcaagctaatgaaggcgaaaaaatgacaacattagatgatacagaacgtgaattattaacgagcgatattgtcattactaatggacaaactccaattgcattagctggtgttatgggtggcgatttttcagaagttaaagaacaaacatcaaatatagtgattgaaggtgctatttttgatccagtttcaattcgtcatacatcaagacgtttaaatttacgcagtgaatcatctagtcgttttgaaaaaggaatagctactgaatttgtagatgaagcagtcgaccgtgcatgttatttattacaaacttatgcaaacggaaaagtgctaaaagatagagtgtcttcaggagaacttggtgcatttattacaccaatcgacatcactgctgataaaattaatcgcactattggatttgatttgtcacaaaatgatattgttactatttttaatcaactagggtttgatacagaaataaatgatgatgttattacagtgctagtaccatcacgtcgtaaagatattacaattaaagaagatttaattgaagaagttgcacgtatatatggatacgacgatattccatcaacgttacctgtcttcgataaagttactagtggtcagctaactgatcgccaatataaaactagaatggttaaagaagtgttagaaggtgctggattagaccaagctattacgtattcgttagtttctaaagaagatgctactgcattttcgatgcaacagcgtcaaacaattgatttattgatgccaatgagtgaagcgcatgcgtcattacgtcaaagtttattaccacatttaatcgaagcggcatcatataatgtggcacgcaaaaataaagatgtaaaattatttgaaatcggcaatgtcttctttgctaatggagaaggtgaactaccagatcaagttgaatatttaagtggtattttaactggagattatgtagtcaatcaatggcaagataagaaagaaacggttgatttctatttagcaaaaggtgtcgtggatcgagtatctgaaaagttaaatcttgaatttagttatcgccgtgctgatattgatggattacatccaggtcgtactgctgaaatcttattagagaataaagttgttggttttattggtgaattacatccaatattagcagctgataatgatttaaaacgtacgtatgtttttgagttgaattttgatgcattaatggctgtgtcggtaggttacattaattaccagccaattccgagattcccaggcatgtctcgtgacattgcattagaagtagatcaaaatattccagcagctgatttattatcaacgattcatgcacatggtggcaatatattaaaagatacacttgtctttgatgtatatcagggcgaacatttagaaaaaggtaaaaaatcaattgcaatacgtttaaattatttagacacagaagaaacattgacagatgagcgcgtttcaaaagtacaagcggaaattgaagcagcattaattgaacaaggtgctgttattagataatgatttaaaccccatgtataaggatatctgaagtagattgatatccctaacatggggttttatttttgggttcaccaatttggttccaatgcatttaaaaagtcaaagaggaacagcggaatacagatgatgcttcgcacaactgcataaaagcctctaatgattaaaaatcaaagaggctttaaaattttttgggctttttcacgatttttaaaatgcttttttgaaatggtatctaaacgtgaaagaccgtatttttttataattttggcggcgattacatcgactttagcaccggcacctttaggaatcgtcatattaatattttttgatatttgatccatatatgtaacaaatgcgtatcgagaaattatgcttgccactgcaatggctaatgacttcgattctccttttgtttcaaattttgttttctttggaagtggtatatctgataatgcgtaatggctatacacttcgcgttttgcgaactgatcaatgacgatatagtctaattgagacgaatcaattttttcaagtacatttttgatggcttcattatgaagggcagctttcatttttacttgagtccagccttttgcttgctgaatattatatttttcattgtgtagtgttaataatgaatgtggtatgaaagtaaccaattgctcagcaagttctacaattttggtatcggttaatttttttgaatcatctacacccaaagtttttaaaatagggacatgctctttggtaacgaaagcagcacacacagtcaacggaccaaagtaatcgccacttccagcctcatcactaccaatacagttaaattgatcatacattaaagtttgttcaagaaaagaattagccatatttttctttttagttttattagtattcaattgagaatgctgcggtagaagttcttcagacacagcttctgcatgattaccttgaaacatgactttacctgattggtaaatatttacagttgtattttgatactttgcacgtgctttcataccttgaggtaaattctcagtatcaaaagaaatgcgtgacattaatgtcgttatgtctttatccgacaatttaaaaacgatattcgccatttgtgtaaatcctttcataaaatttcattgtctttagcaaaaataatcatatcataaatgataataacgtcagaaacatttatgtatgttgtaaagaattaattgcggatacttacaaaatacatagtggtcatgtataatgtttatgaaaatgttatagtgacacaatttaaacatgataaagtattgaatagaaaattctttacattatttcattataaaaagaacattaagtcatctatagagattgtgttgttgttttatcataattgcaatataacaatattagtatcaaattcagacaaactatccagtcatattttataacgtgaatttagattttaaaaaaaggatcaggagaaattataaatgacacagtttaaaaacaaggtaaatgtatcaattaatgatcagctttttacaattgttggggaagataacccagagcacatacgatatgtagcacatttagttgatgataaaataaaagaattagggtataaagcagcaggtttagatacttcaagaaaagcaatactaactgctgtgaatattatgcatgaaaaagtactactagaagaagaaaatcgacgtttgaaacaacaaattcacaaattgcagcagcgtgagcaataaatggtcattgattttatcataatcattttctttgtgtattttgtcatcgttggattcagacgaggtttttggttatctatgatacatttgagtgcaacgattgtatcattgtggattgccagtcaattttacaaatctattgtagaaagattaattgtatttattccatatcctaaaacaacagcatttaatacaacttttgcgtttcattttaatcatctacaaaatcgatttgaagcgattgtagcttttttaatgattacattgttttgtaagttcattttatatctaattatcgtaacttttgataaaataatagcgtatcaaaacattcatattttcagtcgtgcaatgggaatgatagttggtgtgtttatgacgataattgtcttacactttacgttatatctattggcattatatcctaacgaagcattacaacatcagcttaaaatatctattgtgagtcattcattgatttttcacatcccatatttatcggctttcaccattaatttataaattatcataagaggtcaggacaaaggtatatattaatgatacgtcctggtcttctttttatggagtgttattatgacaaaaaaagatgttatcaaactattagaacaaattgctacttatatggaattaaaaggggaaaatacttttaaaatatcagcgtatcgaaaagcagctcaaagtcttgaattagatgaacgaccattagatgaaatatctgatgtaacggagttaaaaggcattggtaaaggtgttgcagaagtaatcaatgattaccgtgagaccggtgaatctcagtatttacagcaattacaggaagaagttccggaaggtcttattccacttttgaaaattcaaggacttggaagcaagaaaattgctaagctatataaagagttgaatattgttgataaagcgtcacttcaagttgcttgtgaaaatggaaaagttagtgaattaagcggatttgctaagaaaacggaacaaaacatattagaagctgtgaaacaacttggtgctaagaaagatagatatccaattgatcaaatgagaagacttaatcaagaaatcattgattatatagatacattaaattatatcgatcaatattcatctgcaggaagcttccgtcgttttaaagaaatgagcaaagatttagatttcataataagtaccgataacccaaaagcagtgcagcagcaattattaaatattcccaataaagtaaaagaagttgcagtggggaacacaaaagtttcattagaattagcgtatgatgatgaaacgattggtgtcgattttcgattaattgaaccaagtgctttttatcatacattgcagcattttactgggtcaaaagaacataatataagaattcgacaacttgctaaagcacgtgatgaaaaagtaagtgaatatggaattgaacaagctgatggtacattaattcaatatgatagtgaagccaagatatatgaacattttaatgtgaattttataccacctgctatgcgagaagatggtagcgaatttgataaagatctaagtaatatcattacaatagatgatattaatggtgatattcatatgcatacaacgtatagtgatggtgcgttttctattcgagacatggtagaagcaaatatcgcaaaaggttataaattcatggtaattactgatcattcacaaagtttacgtgttgctaatggcttacaagtagaaagacttttaagacaaaacgaagaaattaaggctttagataaagaatatagtgaaattgatatttattcaggtacagaaatggatatattacctgatggctcgctggattatgatgatgaaattttagcacaacttgattatgtaattggagctattcatcaaagctttaaccaatcagaagaacaaattatggaacgattagctaatgcatgtcgcaatccatacgtgcgacatatagcgcatccaacagggcgtattataggtagaagagatggttataaaccgaatattgaacaattaatggcattagctgaagaaacgaatacagtattagaaattaatgccaatccacatcgactggatctgagcgctgatatcgttcgtaaatatccaaatgtgaaattaactattaacactgatgcgcatcatacaaatcatttagattttatgaattatggcgtagcaactgcgcaaaaaggatttgtaacaaaagatagagtgattaacgcattatcgcgtgaagcttttaaagactttattgaaaataatacaaaacttaagaaatagagggattttatgagacaaaaaacattagacgtcttagaatttgaaaaaataaaatcactcgttgccaatgaaactattagtgacttaggcttggaaaaggtcaatcaaatgatgccagctactaattttgaaacggttgtttttcaaatggaagaaacggatgagattgctcaaatctataataagcatcgtttaccaagcttgagtggcttatctaaagtatcagcattcattcatcgcgctgatattggcggcgttttaaatgtatcagagcttaacttgataaaaagattaattcaagtacaaaatcaattcaagacattttataatcaattggttgaagaagatgaaggtgttaaatacccaatattagatgacaagatgaatcaattacctgtgttaactgatctttttcaacaaataaatgaaacatgcgatacgtatgatttatatgataatgcgagttatgaattgcaagggattagaagtaaaatttctagcacgaatcaacgtattagacaaaatttggaccgtattgttaaaagccaagcaaatcagaaaaaattatcagatgctattgtaacagttaggaatgaaagaaacgttatacctgtcaaagctgaatatcgacaagattttaatgggattgtacatgatcaatctgcttcaggacaaacattgtatattgagccatcatcagttgttgaaatgaataatcaaattagtcgattacgtcatgacgaagcaattgaaaaagaacgcattttaacgcaactaactggttatgtggctgcggacaaagatgcactacttgtggcagaacaagtcatgggtcagttagattttttaatcgcaaaagcgagatatagtagaagtattaaaggaacaaagccgatatttaaagaggaccgtactgtatatttacctaaagcataccatccattattaaatcgtgagactgttgtagctaataccatcgaatttatggaagatattgaaacggtaattattacaggaccgaatacaggtggtaaaactgtaacattaaaaacattaggtttaattattgttatggctcaatcaggattgttgattcccacacttgatggtagtcagttaagtgtatttaaaaatgtatattgcgatatcggagatgaacaatcaatagaacaatcattatcaactttttcatctcatatgacgaatatagttgaaattttaaagcatgcagacaaacatagtttagttttatttgatgaattaggtgcaggtacagatccgagtgaaggtgctgcattagcaatgagcattttagatcatgttagaaaaattggttctctagtaatggcaacgacgcactatcctgaacttaaagcatatagttataatcgagaaggcgttatgaatgcgagtgtagaatttgatgtagatactttgagtccaacgtataagttattaatgggtgtgccgggtcgttcaaatgcttttgacatttctaaaaagttaggtcttagtttgaatattattaataaggctaagacgatgattggtactgatgaaaaagaaataaatgaaatgattgaatcattagagcgtaattacaaacgtgtagagacacagaggttagaactggaccgtcttgtaaaagaagcggagcaagtgcatgatgatttatctaagcagtatcaacaattccaaaattatgaaaagtctctaatagaggaagcgaaagaaaaagcaaatcagaagattaaggctgcaacaaaagaagctgacgatattattaaagacttaagacaattgcgtgaacaaaaaggtgcagatgttaaagaacatgaattgattgataagaagaaacgattagatgatcattatgaagcgaaatctataaagcaaaatgtacaaaagcaaaaatacgataaaattgttgctggtgatgaagtaaaagtattatcttacggtcaaaagggtgaagttttagaaattgtcaatgatgaagaagcaattgttcaaatgggaattattaaaatgaagttacctattgaagatttagagaaaaaacaaaaagaaaaagttaagccaacgaaaatggttacacgtcaaaatcgtcaaacaattaaaactgaacttgacttacgaggctatcgttatgaggatgctttaattgaactagatcaatatttagatcaagccgttttaagtaattacgaacaagtttatatcattcatggtaaaggtacaggtgcacttcaaaaaggtgtacaacaacatttgaaaaagcataaaagtgttagtgactttagaggtggtatgccaagcgaaggtggatttggcgttaccgttgcaacactaaaataaattataatttgataaattaaatagctgcagttaaaataatgtaaagcaacaagaatacatttcaaacatgttatttgaaataagcataaaaattgagcaaatagaaatacatgaagcatgttatctgatataatttgaacatcataataataattaaggaggattggcatttatggcaatcgtaaaagtaacagatgcagattttgattcaaaagtagaatctggtgtacaactagtagatttttgggcaacatggtgtggtccatgtaaaatgatcgctccggtattagaagaattagcagctgactatgaaggtaaagctgacattttaaaattagatgttgatgaaaatccatcaactgcagctaaatatgaagtgatgagtattccaacattaatcgtctttaaagacggtcaaccagttgataaagttgttggtttccaaccaaaagaaaacttagctgaagttttagataaacatttataagttacaaccaatgacgactggggcatttctttaatgaattgctccagtttttgtttgtgtttttaatataaaaagttgaatgataagtcatcatattgtttacgacttgagaatggtgggattaataaatctatgaacgttaaatgataatctagcatgctgatagatttgtagcagttggtttgataaaaccatgttcaatattacatgatgtgcatgaaaagtcatactcgaagatgttgattattaactagaattagtggtgataaatttgaagcacttttgtagcatcattcattttaaaattagaaggggggatatttttggaagactataagcaacgaattaaaaataaattaaatgtcgtacctatggaaccaggatgctatttaatgaaagatcgtaatgatcaagtgatatatgttggcaaagctaaaaagctaagaaatcgattgcgatcatattttacgggtgctcatgatgctaaaacaacgagactggttggtgaaatacgtcgctttgagtttattgtcacgtcaagtgaaacagaatcacttttactggaattgaatctgattaaacaatatcaaccaagatataatatattattaaaggatgataaaagttatccatttattaaaattacgaaggagaaatatcctagactactagtgacgagaactgtaaaacaaggtactggcaaatatttcggaccgtatccgaatgcatattctgctcaagaaactaaaaagttattagacagaatatatccatatcgcaaatgtgataagatgccagataaattatgtctttattaccatattggacaatgtttaggaccatgtgtatatgacgttgatttgagtaaatacgcacaaatgacgaaggaaattactgattttctgaatggggaagacaaaacaattttaaaaagtttagaagagcgaatgttaactgcaagtgaatcacttgattttgaacgggctaaagaatatagagatttaattcaacatattcaaaatctgacaaacaaacaaaaaattatgtcatcagataaaacgattcgtgatgtctttggttatagtgttgataaaggatggatgtgtatccaagttttctttatacgacaaggtaatatgataaagcgagatacaacgatgattccattacagcaaacagaagaagaagaattttatacatttattggacaattttatagcttaaaccaacatattttacctaaggaagttcatgtaccacgtaatttggataaagaaatgattcaatctgttgtggacactaaaatcgttcaacccgcgcgaggtcccaaaaaagatatggttgacctagctgcacataacgctaaagtatccttaaataataaatttgaattaatatcacgtgatgagtccagaacgattaaagctattgaagaacttggaacacaaatgggaattcaaacaccaattagaattgaagcattcgataattctaatattcaaggtgtggatccagtgtcagcaatggttacatttgtcgacggtaaaccagataagaaaaattatagaaagtataaaatcaaaacggttaaaggtccagatgattacaaatcaatgagagaagtagtaagacgacgatattctcgcgttttaaacgaaggattaccattacctgatttaataatagtagatggtggtaaaggacatatgaacggggttattgatgtgctacaaaacgaattaggtcttgatatccctgttgcaggtttgcagaaaaatgataaacaccaaacatctgaattattatatggcgctagtgcagaaattgtaccactgaagaaaaatagccaggcattttatttgttgcaccgtatccaagatgaggttcacagattcgcaatcacatttcatagacaaacacgtcaaaagacaggcttgaaatcaatacttgatgatatagatggtatcggtaacaaacgtaaaacattattattgcgttcattcggttcaatcaagaaaatgaaggaagctacacttgaagattttaaaaatataggtattcctgaaaacgtcgcaaagaacctacatgaacaattgcataaataaattactgggcgtgagaatcattctcatgccccaaaatatatgaaataatgttacaatatggttaacaaagttatttttttgaatgtacgtggaagcgttttctaaatgagaaagtttatcatcacaagcaattttaaatatcgaatccaaatgttacattgttcgacatgcagtttggtgatcgtgcagtgtgtatttgtctttaaaatgtttcgcttaatgataatgacaacgctagaaacgatatcactttagggggttaagcgtacgtttaatataaatagctcaataaattaaatattcgttcacaggggggactccttttggctcaatcaaaaaatgaattttatctaagacgtattcactcgttattaggtattatcccaataggtgcatttttggtcgttcatttattagtgaatcaccaagcaacacaaggtgctgaagcgtttaataaggcatctaactttatggaatcattaccatttctaattattgtagaatttttatttatatacattccgttgttatatcacggtttgtttggtatacacattgcatttacagcaaaagaaaatgttggacattactcgatttttagaaactggatgttcttcttccaaagagtgagtggtatcttaacatttatctttattggtatccatttatggcaaacacgtttacaaaaagcattttacggcaaagaagtgaattacgatttaatgcacgaaacattgcaacatcctggatgggcaatattttatattatttgtattattgctgttgtgttccactttgcaaatggcttatggtcattcttagttacttggggtggacttcaatctccaaaatcacaacgagtatttacatgggtttcattaatcgtatttttagttatttcgtatattggtgttactgcaattattgcctttatgtaatacatcgcatttaacaaatatagattgaaaatttaggggagtgaaatttttatggcagagaaacatcttattgttgtcggaggtggcctagcgggcttaatgtcaacaattaaagcggcagaaaaaggtgcacatgtagatttgttctcagttgtaccagtaaagcgttcgcactctgtttgtgcccaaggtggcattaatggtgcggtcaatactaaaggggaaggcgattctccttggattcactttgatgatacagtgtatggtggcgatttccttgcaaaccaaccacctgttaaagcgatgacagaggcagcacctaaaattattcatttattagaccgtatgggcgtaatgttcaatagaacaaatgaaggtctattagattttagacgtttcggtggtacattacatcacagaacagcatatgcaggggcaacaactggacaacaattattatatgcattggatgaacaagttcgtgcatatgaagtagatggattagttacgaagtatgaaggatgggaattccttggcatagttaaaggtgacgatgatagtgcaagaggtatcgttgcacaaaatatgacaactgctgagattgaaacatttggttcagatgcagttattatggcaacgggtggccctggtattattttcggtaaaacaacaaactcaatgattaatacaggatcagcggcttccattgtttaccaacaaggcgctatttatgctaatggtgagttcattcaaattcatcctactgcaatccctggtgatgataaactgcgactaatgagtgaatcagcacgtggtgaaggtggacgaatttggacatataaagatggtaagccttggtacttcttagaagagaaatatcctgattatggtaacttagtacctcgtgatatcgcaacgcgtgaaattttcgatgtatgtattaaccaaaaattaggtataaatggcgaaaacatggtatatcttgatttgtcacataaagatccacatgagttagatgtaaaactaggtggtatcattgagatttatgaaaaattcactggtgatgacccacgcaaagtaccaatgaagattttcccagctgttcactattcaatgggtggtctatatgtagattatgatcaaatgacaaatattaaagggttatttgcagctggagaatgtgacttctctcaacatggtggtaaccgcttaggtgccaattcattgttatcagcgatttatggtggtacagtagcaggtccaaacgcgattgattatatttcaaatattgatcgatcatatactgatatggacgaaagtatttttgaaaagcgtaaagctgaagagcaagaacgttttgataaattattagctatgcgcggtacagaaaatgcatataaattacaccgtgaacttggtgaaattatgacagcaaatgtaactgttgttcgtgaaaatgaaaaactgttagaaacagataaaaagattgttgaattgatgaaacgttatgaagatattgatatggaagatactcaaacttggagtaaccaagcggtattctttacccgtcaactatggaacatgttagtacttgcacgtgttattacgattggtgcatataaccgtaacgaatcacgcggtgcccattataaaccagaattcccagagcgtaatgatgaagagtggttaaaaacgacaatggcctcattccaaggcgcatttgaaaaaccgcagtttacttatgatgacgtcgatgtgagtttaataccacctcgtaaacgtgattacacaagtaagtctaaagggggtaaaaaataatgactgaacaatcagtgaaaaacactccacaacatgaaacacaatctaaaccgaaacaaaaaacagtaaaattaattattaaacgacaagatacaagtgattctaagccttatgaagaaacatttgaaattccatatcgtgaaaatttaaacgtcattgcttgtttaatggaaattagacgtaacccagttaatattaaaggtgaaaaaacaacacctgttgtctgggatatgaactgcttagaagaagtatgtggagcatgttctatggttatcaatggtcgtgcaagacaatcttgttctgcgattgttgatcaattagaacaacctattcgtttagagccaatgaatactttcccagttatccgtgacttacaagttgatcgttctagaatgttcgataacttaaaacgtatgaaagcatggatcccaattgatggaacgtatgatttaggtccgggaccacgtatgccagagaaaaaacgtcaaacagcttatgaattatctaaatgtatgacatgtggtgtatgtttagaggtttgtcctaatgttactgaaaataataaattcgttggtgcacaagcaatctcgcaagttcgtttgtttaatttgcacccaacaggatctatgactaaagatgaacgtttaaatgcattaatgggtactggtggcttacagcagtgtggtaattcacaaaactgtgttaatgcttgccctaaaggtattccattaacaacatccattgcagcaatgaacagagaaacaacattccacatgtttaaatcattctttggttcagaccatgaagtagaataaaaattaatcccttttgagttaaaatgttatgttcctttcaaaattaaattgaatggagatacacaataacttggaagggatttttttaataagcagattacatgacaatatgatagtgggctgatttaaaataaatattataatgacaaaaatggtaaacacagtgcataatactaaaatccaatgcttagttatgataaactaaaaattaaattaaaagtaaggatgaccgaatatgaataaaccaataggtgtaatagactctggtgtcggaggtttgacagtagctaaagaaattatgcgtcagttgccaaatgagacgatttattacttaggtgatattggacgatgtccatatgggccaagaccaggagaacaagtaaaacaatatacagttgaaatcgctcgtaaattaatggaatttgatataaaaatgctcgtgattgcttgtaatacagcaactgctgtagctttagaatatttacaaaagaccttatcaatcccagtgattggcgtaattgaaccaggtgctagaacagcaataatgactactagaaatcaaaatgtattagtactaggaacggaaggcacaattaaatctgaagcatatcgtacgcatattaaacgtatcaatccacatgtagaggtacatggcgttgcctgtccaggttttgtgccacttgtagaacaaatgagatatagtgatccaacaattacaagcattgtcattcatcaaacactgaaacgttggcgtaatagtgagtctgatactgtcattttaggatgtacccactatccattgctctataaacctatctatgattattttggtggtaaaaagacagtgatttcgtctggattagaaacggctcgtgaagttagtgcattgctaacatttagtaatgaacatgcaagttatactgaacatccagatcatcgattttttgcaacaggtgatcctactcacattactaacattatcaaagagtggttaaatttatctgtcaatgtggaacgtatatcagtgaatgactaggaggatttttaatgaaagagattgttattgcatcgaataatcaagggaaaataaatgactttaaagtaatatttccagattaccacgtaataggtatttcagaactaataccagattttgatgtggaagaaacaggatcaacatttgaagaaaatgctatattaaaatcagaagctgctgcaaaagcattgaataaaacggtcatagctgatgacagtggactagaagtttttgcattaaatggtgagccaggtatatactctgcacgttatgatggtgaaaataaaagcgatgaagcaaatattgaaaaattattaaataagcttggtaatacaactgatcgtcgtgcgcaatttgtttgtgtcataagtatgagtggccctgatatggaaacaaaagtatttaaaggtactgtttcaggtgaaattgcagatggaaaatatggcgaaaatggtttcggatatgatccgatattttatgtaccgaaattagataaaaccatggctcaactttcaaaagaacaaaaagggcaaattagtcatagacgaaatgcgattaatttacttcaagcttttcttgaaggtgataaaaatgtctaaatggattattgtgagtgataaccatactgaatcaggcgttttatatcaaatttatgaaatgcacccagatgcagatgtatatttacatttaggagattcagaattcgcgtatgatgatacggaacttagcttatttaatagagtaaaaggcaattgtgatttttacccagaatttgaaaatgaagcggtcgcaaaatataatgacgtgaaagcattttatactcatggacatttatatcaagtcaatcgaacaagagatttattagctgaaaaaggacttgaattaggttgtttgtttgcattttatggacatacacatgtggcaaaatatgagtatattaatggtgttcatgttattaatcctggaagtatatctcaatctagaagttcaatggaagaaacatatgctgaagttattattgatgatcaaactttacatggcaccatcaatttcaaaaatcgacatcacgaaacaatcagtcatactactttttaaatagaagtagctatggctttttttagtttatagactgatttaactaggaggtcgtgtcatgaatgtttgtttaaaagtatttctgacaattttataagataattggaatgaataacacatttatgttatgaaaagaattgtaattttggagaatgtgattgttgataaccctatatggttgaatcatgttgattatttggttaaaagtgtattattaaaaagtataaaattaagattccaagaagtcaggaaatttgaaattttagttaaaatcatgaatcgtatacatatttaaaaggatttctaaagtcataaattatatcaataatttgatggttaaaatatggagtagcaaaattcttgaaattcagaaatgtagtgacacaaatattaatgtttagttaataaatagttaatgtagttttttgtatctgtctattattataaatatatacaaaataaatatttgaggataggtgttattaattatgaaaaagaattttattgggaaatcaattttaagcatagctgctattagtttaacggtatcaacgtttgccggtgaatctcatgcacaaactaaaaacgttgaagctgctaaaaaatatgatcagtatcaaacaaactttaaaaaacaagtaaataaaaaagttgtggatgcacaaaaagctgtaaactttttcaaacgtacaagaactgttgcaacacaccgtaaagcacaaagagctgttaatttaattcatttccaacacagttatgaaaagaaaaaattacaaagacaaatcgatctagttttaaaatataatactttaaaataattgatagaagccatgctatagagtgtggctttttgctatatccaaaggtataattattttataatattgtgtttatttgaatggtgagcttattgggataaataatataaataattacttaaaagtgaatgcaatagttgtttatgttttgaacaagcgaggtggctattgtgaaaaggaaatcgaatgtattaacaatcataaaaattgtaacggatatagtggcaaccgtgttaatcatacgtgctttattaaacagtcgtaaagatgctaaataaattggaagttacttaaaataaaaaagcacgccaatacgttagcattgttttctaacgtttggcgtacaactatttaattcagtatgttttttaataccaagtaatcgagtcgatttcaccgtttttaacaactttaatattttttctgttctcttctaaaggacgagttaagtcaaaagtatagtaatctctaggaccaccatctttaattctgacaactgctttcttcacatcaccttggcttaattttttaacaataaggtacagatcattaacagtttcagctttgtaaggagttagatttttatcagactctttcattaacttatcaatacgttcatcgtcctttttagcttgatctgctaaattttttgcgatttctaaacctttccattcataactaaagaaagctttagcatcattagtttgagttaaaagacctgcagcgattactgtagatgcgataatagtttttgtgatattttttttcataataagttctccctgtaaaataaatttgtacttactaatgcgagtacactgctattttacaaacggtttcatacatttaccagttaacacttcattaattaaaattaagtgcaaattaataaggtttaatgcaatcgaaaaagaataatgatgaatttgatggtattatttttatttgaggtattattgaatttgttgatagtataataatagtagtaaacgtcactcaactatgattgaataatttttattgctaaaacgatatttacatttctctacattttgtttgctaagttggatagacaaacactccaaattgttatacatatagctgttttgatatatattttttataaaacaaagaaatgattcatagtagagaagtaattaatatgtataattttacttataaagaaataagagatatattctaattatggttgatatgttatgattaatatataagttaaaaattatactatttaattgaattatgcattttcgaagtaaacataattcaacacttacatttttaaatagataaaatagtgtaaaatcacgtgccaagattactatagagtaggcattgagtattattggcaatcacttaagtgattgttatttttcgtggtcaataataaagatataaataaatatattgaggtcaaacgatgataattaaaattttaacaattctattactactttgtatattgagctatttggttacaaatagaaagaagccttttctgttcttaaagacactctttatgggtgtggtatttatctttataggatatatttcactggcaatatctgccgtaattatttatggtattattcaatttatcacaattgattttggtagttttttcttaatgggtattatattgatcttgatttcaagtatattccaattatttatagttagattactttttagaaaaaagaatgtcgatttgacagaggttgtcgttttagagcatttaattcaatggttcttagtttactttgcgatctatcaagcagtaaatgaaaaaatggacattaatgatattaatatcgacaatttccaatctgtcttttttgacgtgtctaatttgaatttagtaattctaccaacgttaatcattagctgggtcacaatatttaactatagaatgagaagttacaaataaaatctatgagattataccttcagacaccaacattcaaatggtgtcttttttgttgtgtggttttatttttgaaattcgaaaaagtagaggcatgaattttttgactagtgtataagtgctgatgagtcacaagatagatagctatattttgtctatattataaagtgtttatagttaattaataattagttaatttcaaaagttgtataaataggataacttaataaatgtaagataataatttggaggataattaacatgaaaaataaattgatagcaaaatctttattaacattagcggcaataggtattactacaactacaattgcgtcaacagcagatgcgagcgaaggatacggtccaagagaaaagaaaccagtgagtattaatcacaatatcgtagagtacaatgatggtacttttaaatatcaatctagaccaaaatttaactcaacacctaaatatattaaattcaaacatgactataatattttagaatttaacgatggtacattcgaatatggtgcacgtccacaatttaataaaccagcagcgaaaactgatgcaactattaaaaaagaacaaaaattgattcaagctcaaaatcttgtgagagaatttgaaaaaacacatactgtcagtgcacacagaaaagcacaaaaggcagtcaacttagtttcgtttgaatacaaagtgaagaaaatggtcttacaagagcgaattgataatgtattaaaacaaggattagttaaataaaacttcaatcgttgctgttatctggaaataattaattaaatgttatgttaatttttgttaatgaaaaaagtaatctatttaatgacaggttaatgtaattgtcctgaaattgactatatactcagtaagtatcaattttaaggagagcttataatgaaatttaaaaaatatatattaacaggaacattagcattacttttatcatcaactgggatagcaactatagaagggaataaagcagatgcaagtagtctggacaaatatttaactgaaagtcagtttcatgataaacgcatagcagaagaattaagaactttacttaacaaatcgaatgtatatgcattagctgcaggaagcttaaatccatattataaacgtacgattatgatgaatgaatatagagctaaagcggcacttaagaaaaatgatttcgtatcaatggctgatgctaaagttgcattagaaaaaatatacaaagaaattgatgaaattataaatagataataaataaaacaggttgagacaaaaaatggtcttaacctgttttcaatttgcatatgtgataaattctatatcaaaatgcttatgtataatgaatgacatttaaaagtaggggagacaaatataaatacaatagttcctaggattactctcaaaataactatatcaattatttactttgctctcctattttttaaaatatctacatgtttaaacaatcaaaagtgtacaatattaaattatcatttccagttctagtgctatattggtagtagttgactaaatgaaaataagcttataacaagttttttcaatactcgtggggccacaacagagagaaataggatcaccaattccaacaaacaatgcaagttggcgggggccccaatatagaagctggcgaaaagtcagcttacaaaaatgtgcaagttggcggggccccaacatagagaaattggaaccccaatttctacagacaatgcaagttggggtaggacatcgataaagaaatactttttctttagcaattagtatttcttatgcatgagctttactcatgtattcattttttaagtacacattagctacagctaatgataaagaaccactacataataaatcattagtggttctttatcatttctatctcactcttttactggaagaaaaagtttacgtttgtagaacatgccacaataccaaaaataattaagaaaaataagacgataagcatgatgacacttttcaaacaacctctatcagtttctttcgattttctttgttgaacctttttataatcttcaagtagttttgcggcttttttatttatatgtttattcatgatgttgactccttataatatatgtttaattcattaaaatagttgaaaacatgacttgaaataaagatataaagctaaagtaaggatgttcaattgtttcaaattttatgaaagtataacgttaaatatgttaatttgatgatgatatttgctttttattttccaaatggaatttacttaaactgatgcattaaaatattaatgaagcactagaatacataaatgaatagtaatggtgcacagtatagaataattaaggctatattaagtataaatatcgttaactgtaagctatctttagttttaatataaactattaggataatcgacgtaagaagaatcatatatattaatgatgaagaagtccatacaaaatccgcatcatttgttgttaataatgggactataattaatccgaaattaatcatgcatgctatatatactataatgttatacacaatgttaatttttgttcaccaccttatacttctattttaaaaacttctttataatgatatattgtttaatgttgaaataattagattatctaattttcatttgctttacatgtaaaaggctatatatagtatgctctttatgattctaaatgctttttaatatttaatgctcatcaacatttggattttgaatattcaattcaaaaactttattagctacgtcaattgtaaaatcagaaccatagttgacatgagctacttttaattttccatctaaataatagattgcgattgcaacatcgtaaaattcgtcaatgacaaataaactcttttcgtttgttacaacctcatgctctcctgagtatacaacgttaatttcccaatcattaaaaaccatttgttaacctccttgaacatttaaattgattcaacttaagtttaacttattcatacaacttcgtacaatatctagatgaacattaattgtatttctagaaatctttttcaattatatgtactaattatacttttaaatttcttatttcagtatagttttaaaacgattttaaaataattctgcaaatatattaacacataatgtgttcaaaaagttttgaacaatttcaaaacttttatataaagggtttgacaacatggaattcaaatttcttattttaaaaattacctcatatagtgtcatgtttagtctaatttttaagtcaggaaagcaaatcaagtagatagtttaaattaaaaatatcataagttaattaaactaaattcagtataaaaattagccgaaaaacatcatttctgaagttatcggctaaagttataaattatatttatttgtacatgaacaaataatttacattaatttgtcatttcttctttttcccaatcgattttatatctttctgaagaacgatctatccatttatctttagtattggtacctttccaatttgttgaagtccagtgcaattggtagtcatcacgaactcgttcgtatattacatctatatttgtttgttgtttggatgcttttctatccatagtaataactgtagcgaagtctggtgaaaaccctgaagataatagagaacttgctttgttaggatcaaggaagttatctgctgctttcatagagccatttctagttttcatgaaaagttgattgccatataccgggttccaagaatctctatcatatggtccccaattttgattcaccatattgttaaatatcactttccagcctacttttttatcagttgggctctctaaaattgttttgaaatcaggttgaacatatttcagtgtatgaccaatcgaaacatttgcaccaataaggccgccaatttttcctgtatcatcaccagtaacattaccgttgaatccataagttaaagtactcatatactcttttgtatcaatcgaatttcttggatagtaatcagatatttgagctacttcattatcaggtagttgcaactgtaccttaaaggctgaaggccaggctaaaccacttttgttagcaccttcttcgctataaactctatattgaccagcaatggtacctttcgttctaataactagcagttttttattatgatttttatcatcgataaaactataaaatacttttttgtgcatgccattttctttatcataagtgactaaatcacctgtttttactgtagtattgcttccaatatctgtagtaccggttttaatattaatatcagaatctgcggcattagcgacaggattcattaatatggaacctagcaatagtgttgttgttactgagctgactatacgtgttttcattttcatcatccttctattttttaaaacgatttgaggaaacaataatcaatatgtcaatttagaatattgcagttgagacatatcaaatatttataatcgtttatattagtatatttaatgtagcaactgataaattactgagtgatgatgagtgattattttaagaatatgtttttaacttttatttaaaatttgaaaggaagcatttcaatttcgagggttagtcaaagttgaataaattctttatgaaacaaggaaaagacatagctaattttattgattaatttctttaaaactaatgatttgtttgatttaaaaatgtaatcgattacaatataaaaatacaaatatcttagaattaaatcaattaattaactattaaataaaaattaactatatattaactagtgtaaattaataaatagaaatagagaaaaagggtattaattatgtttggaatttcgtcgggaataaattttgccattacatagaaatatctaatagataacgaaaaagtatcgtatgtatttttaatatagtgtaaaatattatatgtaaaataaaatgtaggtttttagttagaggcattataagaaaattttgagtataggttagcttttaattatgaatcttattgaaatttgattaataaaaatatgataggggattaaaatgaaactattttatatcgtatttcttattattatatggctgaatatatttttaggaaatgaaatcatccatacactgactgttttaataacaacattgtatattgttaattcaagaaaggggattaaaaatgacagagttgaataatattataaactctcttcaatctttgtttgagtctgaatcaggctataaaatttcgaaaaattcaggagttccatatcaaacagtacaagatttaagaaatgggaaaaccaaactagaagatgctagatttagaacgattattaaactttatagttactatgtctcattaaaagaacactaatcatgggacaataaagtattgctataataatttaatcattaaatgaaggaatagagcctaagacataataaatcaatgtcttaggctctacaatattatattggtagtagttgaccgaatgaaaatgcccatgtaacaagcatttttcaattataggcggggccccaacatagagaatttcaaaaagaaattctacagacaatgcaagttggggtgggccccaacacagaagctgacgaaaagtcagcttacaataatgtgcaagttggggagtgacaacgaaataaattttataaaatactatttctgtcacattcctactcccaattccatttaaatatatagaaaattttacctattatatacatcatacactttaaaaattatcatttaaataatctgatttggaattaaagtgcatgaagtataagtcaccttcatatactaatcaaagaggacgtcaacagttattttattaggatttttaacataaacatttgctagatctgaatgtaatcttttgcttaaatcaatagtgtagttattaccgccaccggtgatcttaagcttacctttattacgattttcgttatataatattttattttttattaacgcttctcgtgcacggaaatcgatttctttcaatgttaatactggtttattgccttggtatattttatgcgcaccaataatcgtttgtagtttatctttgtattgcacaaaaagattataagttttatcagaaggttttgcggctggtgtaacgccacctgtaaatgtctctctataagaccaccataactgatcagtatctttgtcttttagtccaaacacatctacgtaacgatcttttaactgattaatatttccccaactttcagcgccccataaagatatatgtgctgaccatgaatatctcttaagttcaacataaatgtttccattatcatattgatatagccatttatttgaaaatgaaaaatgaggctgtgtgtaatatttaattaattcattgatgttagtttcatcttgaccaatgctataagctttagcttcagagtaaaaactaaatactggtttttgattttgaggtaatacagtacctaatagtaataatgttgtcgttaaaattatatttttcgtgatgttcttactcattagaacatctcctttcagaggaatcatgatacgaggaataagaaatttaaatgtgagcgaagtcaatatagtatttgcgattatttttattaactccattattattgttagtttgatttttcgaggataacttcaatttttgcattttgaggttttttaacatatctatttgcatcagttgatggcaaccttttacttaaatctattgtgtagttattgtctgcacctgttattttaatttgtcctttattataagaattattatataattttttacttttaattaatgtttgacgaatacgaaaatctaattcttttaaagttaaaacaggcttattgccttcataaactggaaatccgccagtaaacgtttctgctttatctttatatgttacattcagtttatagtgtttatcgttagatgttgctgcaggagtaacaccaccagtaaacgtttcttgagataatgcaaaagaatcaatggtttcttggtcttttatgccaaaaatatcaacgcttttatttcttaattggttgatattgccccaactttcaggtccataaacttgaatatgactataccaagaaaactgtaacaacgttgcatgaatcgtaccgttatctttttgccataacgtactgttagagaaggttaaatatttttgcgagtaatatttagttaactcattaacgttagtttcgttttgatttatataataagctttcgcttcagatgaagaattgataggtgtattaggaaattgtgtagatgctgtacctaatagtaacaatgttgttgataaaataatttttttcgtgatgttattgttcattcgaatttctcctttgagtattgttggaatgtttaattataaaaaggggttaattagataattgaaattatccgcatttacaaaaggtaataggttagttagatttttcgagtatgacttcaatttctgcattacgaggatttttaacataacggtttgtgtcagttaattttaactttttacttaaatcaatcgtgtaattatttccatcagcagttatcttaatttgacctttattaaattctccgttatataactttttattttttattaatgtttgacgaatacggaaatctaattcttttaaagttaatactggtttatttcctttgtaaaattcatgtccaccgatgatagtttgttgtttatcactatattttaaaaatagtctataaggcttatcagatgaagtagctgctggcgtaacaccaccagtaaatgtttcatcataagtccagtaaccttcaactgtgtcctcatctttagttccaaatatatcaacgtatttatttcttaactgattaatgtttccccaactctcggatccaaacacttgaatatgactataccaaacccacgtttgcaatgttgcatgaatgctaccattgggcttttgccataaccattttccagataatgaaaaatgcggctgagtgtaatatttgattagttcattgatattagtctcgttttcactgatattataggcttttgcttcagatgaaaaactgattggtgttttaggaagttgtgttgatgtagtttctaaaagtaacaatgctgttgataaaactaatttattcatgatgttctttttcatatgaaaatctcctttgcgtgaattacccaaagtatataagctattacaccgattcggaattaaataaaagctaaaactatgttaaataaacttaaacagttagtagtgttatttaagcaaaacttatcatttttaagttttggacagaaacagtatctaataaagtaggcgggagttatatattaaaaacgatacgttagaattattctctaatcaattgtattaaattgtttgataattgaattttctaactacttgaaaaatagttatactttaaatgtagtacttattttaattatttcctactacttaaatttaatattaataaaatgttcatttaattattgataaaatattacaaattttaatagtaggttgtgtttattttgtatgcgcttacaatttaggtgtaactaaaataaaaggagttgttattaatgaaaaatttacgaaacagaagttttttaactttattagacttttcacgacaagaggtagaattcttattaacactctccgaggatttaaaacgtgctaaatatattggcactgaaaagcctatgttaaaaaataaaaatattgcactgttatttgaaaaagattctacaagaacgcgatgtgcatttgaagttgcagcgcatgatcaaggtgcaaatgtaacttatttaggcccaactggatcacaaatgggtaaaaaagaaacaactaaagatactgcacgtgtgcttggtggaatgtatgatggcattgaataccgtggtttttcacaaagaacagtagaaactttagctgagtattcaggcgtaccagtgtggaatggtttaactgatgaagatcatcctactcaagttcttgctgatttcttaacagcaaaagaagtcttaaaaaaagattatgcagatattaactttacatatgttggagatggtcgtaataacgttgcaaatgcattaatgcaaggtgctgccattatgggtatgaacttccatttagtttgtccaaaagaattaaatccaacagatgaattattaaatcgctgtaaaaatattgccgctgaaaatggtggcaacatattaatcacagatgatattgaccaaggtgtaaaaggttcggatgtaatttacactgatgtttgggtatcaatgggtgaacctgatgaagtatggaaagaacgacttgaattattgaaaccatatcaagtaaataaagaaataatggataaaactggtaatccaaatgttatttttgagcattgcttaccatctttccataatgctgatacgaaaataggtcaacaaatttttgaaaaatatggtattcgagaaatggaagttacagatgaagtattcgaaagtaaagcttcagttgtattccaagaagctgagaacagaatgcatacaatcaaagcagtcatggttgctacattgggtgaattttaaatgatataaggaagtgaatatgatggcgaaaatagtagtagcattaggtggtaatgctttaggaaaatcacctcaagaacaactcgagcttgttaaaaatactgcgaaatcattagtaggattaataacaaaaggacatgagattgttattagtcatggtaatggaccacaggttggaagcattaatttgggacttaactatgctgcagaacataaccaaggtccggcatttccatttgctgaatgtggcgcaatgagtcaagcttacatcggctatcaattacaagaaagcttacaaaatgaattgcattctattggaatggataaacaagtggtaacactagtgacacaagttgaagttgatgaaaatgatccggcatttaacaatccttcaaaaccaattgggttattttacaacaaagaagaagctgaacaaattcaaaaagaaaaaggatttatatttgttgaagatgctggaagaggatatagacgcgttgttccttcaccacaacccatctctattattgaattagagagtattaaaacacttattaaaaatgatacactcgttattgctgctggtggtggaggtataccagtaattagagagcaacatgatggttttaaaggtattgatgcagttatagacaaagataaaacaagtgcgttgttgggtgctaatattcaatgcgatcaattgattattttaacagcaattgattatgtatatattaattttaacactgaaaaccaacagcctttgaaaacaacaaatgttgatgaattaaaacgatatatagacgaaaatcaatttgcaaaaggaagtatgttaccaaaaattgaagcagccatatcatttattgaaaacaatccaaaaggaagtgtgcttataacatcattaaatgaattagatgctgccttagagggtaaagtaggtactgtgattaaaaagtaattgaattgaaacgcttttcaattactatatgtcaaatgcatgatttttattatttatgtgcaccccctgaaaataatgcctctattttgatgcggggtgcactttcttaatttatatttataaaatctttaaggtagaaatgctaggttaaatgtcgaaggagatgaaaccgtggaaaatacaattaatgaaagtgaaaagaaaaaacgatttaaattaaaaatgccaggtgcatttatgattttattcattttaacggttgttgcagttatagcaacatgggttattcctgctggtgcatattctaaactttcttacgaaccttcatcccaagaactaaagatagttaaccctcataaccaagtgaaaaaggttccgggtacgcaacaggaactagacaaaatgggggttaaaattaagattgaacaatttaaatcaggtgcaattaataagccggtatcaattccgaatacttatgaaagattaaagcaacatccagctggaccagaacaaataacaagtagcatggttgaaggtacgatagaagcggtcgatatcatggtattcattcttgtactagggggacttattggcgtagttcaagccagtggttcttttgaatcgggattgttagctttaacgaagaaaacaaaagggcatgaatttatgctaattgtgtttgtatcaatactaatgattatcggcgggacattatgtggtattgaagaagaagctgtagcattttatccgattttagtccctatatttatagcgttaggatacgattctatcgtttcagttggtgccatattccttgccagctctgtcggtagtacattttcaactattaacccgttctcggttgtaattgcctctaatgccgctggtacaacttttacggatggcttgtattggagaataggtgcttgtattgtcggtgcgatttttgttattagttatttatattggtactgtaaaaaaattaaaaacgatcctaaagcgtcatattcttatgaagacaaagatgcttttgaacagcaatggtctgtattaaaagatgacgatagtgcccattttactttgcgtaagaagataatccttacattatttgtactaccatttccaattatggtatggggagttatgacgcaaggttggtggttcccagttatggcttcagcatttttaatatttacaattataataatgtttattgctgggacaggtaaatctggattgggagaaaaaggaactgtagatgcatttgtcaatggtgcatcaagtttagtaggtgtatctttaattattggtttagctcgaggtattaatttagtgttgaatgaaggtatgatttcagatacaatcttacacttttcatcatctttagttcaacatatgagtggaccattatttatcatcgtattactatttattttcttctgtttaggttttatcgtgccatcatcttctggcttagcggtattatcaatgcctatctttgcaccactagctgatacagtaggtataccaagattcgtcatcgttacgacatatcaatttggtcaatatgcgatgttattcttagcgccgactggacttgttatggccacactacaaatgttaaacatgcgatattcacattggttccgatttgtatggccggtagttgcttttgtattgattttcggtggcggagtactaattacgcaagtactaatttattcataatttgaaatgctatattataaaaaatactaatggggttttatgcatctcgtaggtttgtagaaatactaaactaagcgaggtgcattattatttttgattaagaaaataatgacggtaatgataacactagtaagtaattgatacaatgctctatttaataatgatatttttaaaatttgtttttaatgtaatgttagatctatggtatattatatttatcgtggtaaatatgtatttgctgtaaacagtttttgtaacacatgatacatatggttgtgaaaatagcatatataaaggatggctataaatgacacatttgacaaaggttttagatacactaactggaatatgcgtagtattattatttagtaaatattttgtggcgtatgcaaatatggtgtttgattggaatttaagatggtatttgctagaaaacataccacatttgccaattatattatttattctgatgtttattttcggagtaccttctgaaatgataaaagataggcaaaggaaaaataacggtgtttaatttatcgatatttagaggtgataaaatttgtcaactattacaaagactaaaataaaaatctttattaattattttattggtatattagccttggcgtttgctgcttatatattatttaaataaagtttagagtgaaacgtgtttatgaactagacgttctagtatagttactatagctttagtcagaaggtatcattgataagatcatattaaatcaaagaggcattgatatacactaaaaagaggcaagattacctgcctctttttagttattaaatatacgtgttaattcttggtaatagtgttactgagacgcattacgaagaaatttatcttgtttttccttttttaaaaagaagtgaagatatcctataaagactctaagtactattacagtggctaataacacttcgataaacaaaagacctttccaaatgtctggaaacataagtacaggcaaactgttctttaaagcagttgctgagattactaaagggaatgtgaaagctgaaaatacgggcgaaaaaggttcttttagtaatttaggcaattgtataatgatataaaaataaaatatttgagctaatagtaaaaatataattacgataaaagcattcgccttaggaaaagctataacatatgctgcagcgactaaagaaaatggtgcacaaattgtcgatgtgttcggtttgattgacgtctgcaatggaaatgcttttaatcgcttgaaaactataggtaagacaatacaagtagctacaaagccatatattactgttaattgacctatgaaaaaatatccgctaacgggtgccgtcaatcctgcgatagcaataccaataaaaagtacagtccacgaaggataaacatttttaagtgaaaaatcttttaaatattttattgaaaaaataatcatatgcgtcataattcccacaaggcataaaatccaaataggcgttattaagctattgataaaagttatgttactaaaaaatgtatttaaataagtagtacctaaaaagccagacatgaaaaatgttgtgaacactgatgaaactagaggactgtttaattgttctttcacattattaaaatatttgatcatagtacataaaaggtgaatccaaatcaagaaagcaaagattccgcaaacagcgtttaaagtaagagataagtcttttaatagattacccaggcctaataatcctaagactagtcctgacgttactagaggtgctttttgaagtctcatgatttacaacctttcttatgtgattttcttcactaattatatcatgatagctatggccaattaataagaagagtgtgtactattacgttattagagtatgtatattggattgatagacacataattgacatttaaatctcaaaattaatgatatttgaggtatgctttgcaacctaaatattggaatatgtggaaaagtaattatttaatttaaatgatgattgaagatttacaagggggtgtacaaaatgagaaatcaaattcaaaaactattagacagtgatttgagcagtttacatatatcgaaacaaacaggagttccacaaagcacaatacacagaatgagaaaaaatgaaagatcattagacaatatgtcattgaaaaacgctgaactactttataaatttgccaatagtatatttagcaatgaaaattaagaagaataattagtgagttaaataattaaaaaaccacgtctcgatggacgtggttattttttttagatgtatataattataattataggatttcgggcccctgaaaagtccctaaaattttgaatagtatcaaaatctataggaataatataataataaaaatctctacgcatgcaaatggtgagtgttaaaaatcttggtgtagtgttggtgtagttcaggtgcagtatagatgaaatttgagcacaaaattacttaattaaaaatgtataaacaagtgtcagacgcgtgtcaattgtgtgtcaaaaaattctataacgaataagcatgcttgttttaattactgtattttcggggcttatgcgggggacgttttggtgacgcatcatactatattactgaaattcaaaacaaaaagagccccgtaatcacggaactcttttgtttggtaatgcgtataaaaatacctataaacgtcctgggagggattcgaacccccgaccgatggcttagaaggccattgctctatccagctgagctaccaggacacgtttaacaacacaagaattattatatctaaatgaacttaaattagcaataccttgtaaataaaaaatgtttatatttttcactattatagagctatttatctaaaaaggttcaataagacttaaatacgaattcaggcaacttaattgtgttaaatacagttttgaatgcctaactgtatttcttttctctttaaaatacagttaagtacattataagatgttgtgcggataaacaaactaattgtatcaaatttattttaaaataacaacaacaaaacgataagcgaataacatttcggtgatttaaaagctacgcacgtttttgttatcttcaaatttaaattttaaggagtgttttcaatggaaggtttatttaacgcaattaaagataccgtaactgcagcaattaataatgatggcgcaaaattaggcacaagcattgtgagcatcgttgaaaatggcgtaggtttattaggtaaattattcggattctaatttcaatatgttatgtaagtaatcagtattatttcaaaggtgagggagagatttaaatgactggactagcagaagcaatcgcaaatactgtgcaagctgcacaacaacatgatagtgtgaaattaggcacaagtatcgtagacatcgttgctaacggtgtgggtttactaggtaaattatttggattctaatataataactaatattctttaaaataaactgggtgagcatactttaatgttatgcactcagtttattttatttgcagaaatttgagcctctgttaagatttagatacatagacaatataggagatggggaaattgggatataaaaatattttgatagactttgatgatacaattgttgatttttatgatgcagaagaatgggcgtttcactatatggcgaatgtttttaatcataaagcaacaaaggatgattttttaacatttaaaaaaatcaatcaccaacattgggaagcttttcaacaaaataaattaacgaagtctgaagtattatcagaacgatttgtgaattacttcaaacatcatcaaatggaagttgatgggcatcgtgcagatgtgttatttagaaatggattagcagaagctaaagttaaatactttgatcaaacattagaaacaattgtcgaattatcgaaaagacatgatttatatattgttactaatggtgtaaccgaaacgcaaaagagaaggttaaatcagacgccgttgcataaatatattaaaaagatatttatatctgaagaaacaggatatcaaaaacctaatccggaattttttaattatgtttttaatgatattggtgaggatgaaagacagcactcgattatagttggagattctttaacatctgacattctaggtggaatcaatgcgggtatagctacttgctggtttaattttagaggatttgatcataatccaggaattatacctgattatgaaattaattcatggaaacaactaaatgatattgtacgttaagacaaataatttgaaaatgatttacttatattagcttaagaaagtaattgtaaaaaagacactacgaaaagatgcattttcatgctcgtagtgtcgaatattattatcttatggtttccacaataagacatcatgtccctctatatttttagcttccacatctgtaaatccatgatgtaaaaagaaatccttagaatcatttctgccaatggctttaattggcatattgaaactctttgcaaaatcaatcaattctgaagcgtaccctctgttttgatattttggtaatacttctaacttccataataatatataatcttcaaaatctgggaagtagatttcttcgacatcacctttttttagtaatgccattctagctcctaattgatctccgacaaatatgccataaaatggtgaatctgaacttgcatcaatcatttgaccgtttaactcattgaccatgtataagtctttgttgccaaacgctctaaagttttcgaataattcgtcagttttgtaattaatttcaagacgtttgatttcactcatatttatctaccccttatttgtttactactattattatacattaaaccacttgtgtttttcattgatttgaaaatgtaaaacaatgaatattataaattttccatgattaaattgattttcaagccgtaaaattgtcaatcaccggtatagactttatactatagtttgtaatcgcgtacttaaggagaaaaaacatggactgtaaagtagttagtttaaatgaaaaagatcagtttataccaaaaataaagagcagtgaccctgtaataacaggattatttcaatatgatgcagctcaacaaactagttttgaaaaaaggatgtctaaagaaaataatggaagagaagcggcattagcgaatgttattcgtgaatatatgagtgatttaaagctttcaagtgaacaagaattaaacatacaacatttagctaatggttcaaaagttgtgattggtggacaacaagcagggcttttcgggggaccattgtatacattccataaaatattttcaatcattactttatctaaggaattaacggatacacataagcaacaagtagtaccagttttttggattgcaggagaagatcatgatttcgatgaagtgaatcatacatttgtttataacgaaaatcatgggtcgctgcataaggttaaatatcatacaatggagatgccagagacgactgtctctagatattatcctgataaggctgagttgaaacaaactttaaaaacgatgttcattcatatgaaagaaactgttcatacacaaggtctactggagatttgtgacagaattattgaccaatatgactcgtggactgatatgtttaaagcactactgcatgaaacatttaaagcatatggcgttctatttatagatgcgcagtttgagccgttaagaaaaatggaagcgcctatgtttaaaaagattttgaaaaaacatcagttgcttgatgatgcttttagagcaacacaacaacgtactcaaaatcaaggcttgaatgcgatgatacaaacagatacaaatgttcatttattcttacatgatgaaaatatgcgtcaattagtttcgtatgatggtaagcattttaaattaaataaaacagataagacatatataaaggaagaaattataaatattgcggaaaatcaacctgaattattttctaataatgtagtgacaagaccattaatggaagaatggttatttaacacggtggcatttgttggaggaccgagtgaaattaagtactgggctgaactaaaagatgtatttgaactatttgatgttgaaatgcctatcgtgatgccaaggcttagaattacttatttaaatgaccgtatagaaaaattactttcgaaatacaatattccattagaaaaagtgttagtcgatggtgttgaaggagaaagaagtaagtttattagagaacaagcatcacatcaatttattgaaaaggtagaaggtatgattgaacaacagcgtcgtctaaacaaagacttattagatgaagtggcggggaatcaaaataatattaaccttgtgaataaaaataatgaaattcatatacaacagtatgattatttgttaaaacgttatcttttaaacattgaaagagaaaacgacatcagtatgaagcaatttagagaaattcaagaaacactccatccaatgggaggattacaagaaagaatatggaatccacttcaaattttgaatgattttgggacagatgtgttcaagccctccacctatccaccactttcttacacttttgatcatattattataaaaccttaatataccaagggtttagcccgatttatcttaatgataaatcgggcatttttttgttttttaaaataaatttcacaaattttgtataaatagtggtggatagtggggagatgtggtaaattatatataaggtgaggtgataaaaaatgttcatgggagaatacgatcatcaattagatacaaaaggacgtatgattataccgtccaagtttcgttatgacttaaatgagcgttttattatcacaagaggccttgataaatgtttattcggttacactctagacgaatggcaacagattgaagagaaaatgaaaaccttacctatgacaaaaaaagacgcacgtaagtttatgcgtatgttcttctctggtgctgttgaagtagaacttgataagcaagggcgtattaacatccctcaaaacttgaggaaatacgctaatttaactaaagaatgtacagtaatcggtgtttcaaatcgtattgagatttgggatagagaaacttggaatgatttctatgaagaatctgaagaaagtttcgaagatattgctgaagatttaatagattttgatttttaaaatggaggaattgaagtgtttcatcatatcagcgttatgttaaacgaaaccattgattatttaaatgtaaaagaaaatggtgtgtacattgactgtacgctaggtggagcgggacatgccctttatttactaaatcaattaaatgacgacggaagattaatagcaatcgatcaagaccaaactgcaattgataatgctaaagaggtattaaaggatcatttgcataaggtgacttttgttcatagcaacttccgtgaattaactcaaatattaaaagacttaaacattgaaaaagtagatggaatttattacgacttgggtgtttcaagcccacaactcgacattccagaacgaggattcagttatcaccatgacgcaacattagacatgcgtatggaccaaacacaagaactaacagcatatgaaattgttaacaattggtcatatgaagcgttagtgaagattttttatcgctatggcgaggagaaattttcaaaacagatagctcgaagaatcgaagcacatcgcgaacaacaaccaataacaacaacattagaattagttgacattataaaagaaggtattcctgcaaaagcaagaagaaaaggcggacatcctgcaaaacgagtatttcaagcactacgaattgcagtaaacgatgaattgtcagcttttgaagattcaatagaacaagcgattgaattagtgaaagtagatggcaggatttcggtaatcactttccattctttagaagatcgtttatgtaaacaggtgttccaagaatatgaaaaaggtccagaggtaccaagaggattaccagttataccagaagcatatacacctaagttaaagcgtgttaatcgtaaaccgattaccgctacagaagaagatttagatgacaataacagagcacgaagcgcgaaattacgtgtagctgaaatacttaaataaggagcaatttataatggctgtagaaaaagtgtaccaaccatatgacgaacaagtttataatagtataccgaagcaacaaccacaaactaagcccgaaaagaagactgtttcgagaaaagtggttgtacaattaactaaatttgaaaaagttttatacataactttgattactgtaattgctatgttaagtatttatatgctatctttaaaaatggatgcgtatgatacgcgaggaaagattgcagatttagattataaaatagataaacaatcaagtgaaaacagtgctttacaatctgaaatcaaaaagaattcttcttatgaacgcatatacgaaaaggctaagaaacaggggatgagccttgagaacgataatgtaaaggtagtgcgtagtaatggcgaagcaaaaaattaaaattaaaaaaaataaaataggggcagtcctacttgttggtttattcggactgctcttttttatattggttttaagaatttcatatatcatgattactggacattctaatggtcaagatttagtcatgaaggcaaatgaaaagtatttagttaagaatgcacaacaaccagaacgaggaaagatatatgatcgtaatggtaaagtgctagcagaagatgtagaaagatataaacttgttgcagtaatagataaaaaggcgagtgccaattctaaaaaacctaggcatgtagttgataaaaaagagactgcaaagaaattatctacagtcattaatatgaagccagaggaaattgaaaagagacttagtcaaaagaaagctttccaaattgaatttggacgcaaaggaacaaatttaacgtatcaggacaaattgaaaatagagaaaatgaatttgcctggtatttctttattgcctgaaacagaacgcttttatccaaatggcaattttgcatcacacttaattggtagagctcagaaaaatccggatactggtgaacttaaaggtgcacttggagttgaaaagatttttgatagttatttaagtggatctaaaggatcattgagatatattcatgatatttggggatatatcgcaccaaatactaaaaaagagaagcagcctaaacgtggtgatgatgtccatttaacaatcgattcaaatattcaagtatttgttgaagaagctttagatggcatggttgaaagataccagccgaaagatttatttgcggttgtcatggatgccaaaactggagaaattttagcatacagtcagcgaccaacatttaatcctgaaactggtaaagactttggtaaaaagtgggcaaatgacctttatcaaaacacatacgagcctggatcaacatttaaatcatatgggttagcagctgctattcaagaaggtgcttttgatcctgataagaaatataaatctggacatagagatattatgggttcacgtatttcagactggaatagagtcggttggggtgaaatcccaatgtcactcggatttacttattcatctaatacattgatgatgcatttacaagatttagttggtgcagacaaaatgaaatcttggtatgaacgatttggatttggaaaatcaactaaaggtatgtttgatggagaagcacctggtcaaattggatggagtaatgagttgcaacaaaaaacgtcatcatttggtcaatcgacaacagtaacacctgttcaaatgttacaagcgcaatcagcgttctttaatgatggtaatatgttaaaaccatggtttgtgaatagcgttgaaaatcctgttagtaaaagacaattttataaagggcaaaaacaaatcgcaggcaaaccaataacaaaagatactgctgaaaaagttgaaaagcaattggatttagttgtgaatagtaagaagagtcacgctgcaaactatcgtattgatggttatgaggtcgaaggtaagactggtacagcacaagtcgctgcacctaatggtggtggatacgttaaaggtccaaacccatattttgtaagttttatgggtgacgcgccgaagaaaaatcctaaagttattgtatacgctggtatgagcttggcacaaaaaaatgaccaagaagcttatgaattaggtgttagtaaagcgtttaaaccaataatggaaaatactttgaaatatttaaatgtaggtaaatcaaaagatgacacatctaatgcagagtatagtaaagtgccagatgttgaaggtcaagacaaacaaaaagctattgataatgtgagtgcaaaatcattagaaccagttactattggttctggcacacaaataaaagcacaatctataaaagcagggaataaagtcttacctcatagtaaagtactgttattaacagatggagacttaactatgcctgacatgtcaggatggacgaaagaagatgtcattgcttttgaaaacctaacaaatattaaagtaaatttaaaaggtagcggttttgtgtcccaccaatcaattagtaagggacaaaaacttactgaaaaagataaaatagacgtagaattttcatcagagaatgtagacagcaattcgacgaataattctgattcaaattcagatgataagaagaaatctgacagtaaaactgacaaggataagtcggactaacaagaatggctacattaaattaggatgtattgtcactatttgtttttactaaagtaatgctgtgatagaaaacaacatcttcatttaatctttataaataagtgttgatagagaattttaaggtagacgaggtcagattaacttgtttgttataggcaaactttttatactggcctcttatgccgtaaaaaagaaaaattataaattttgattacaactttgtttatttaattgaaaaattgataatatattagtggttaaaaaagtctggattaagaagaggagatagttatgatttttgtatatgcgttattagcgctagtgattacatttgttttggtacctgttttaatacctacattaaaaaggatgaaatttggtcaaagtattcgagaagaaggtccacaaagccatatgaagaagactggtacaccaacgatgggtggactaacatttctattaagtattgtgataacgtctttggtggctattatatttgtagatcaagctaatccaatcatactgttattatttgtgacgattggttttgggttaattggttttatagatgattatattattgttgttaaaaagaataaccaaggtttaacaagtaaacagaagtttttggcgcaaattggtattgcgattatattctttgttttaagtaatgtgtttcatttggtgaatttttctacgagcatacatattccatttacgaatgtagcaatcccactatcatttgcatatgttattttcattgttttttggcaagtaggtttttctaatgcagtaaatttaacagatggtttagatggattagcaactggactgtcaattatcggatttacaatgtatgccatcatgagctttgtgttaggagaaacggcaattggtattttctgtatcattatgttgtttgcacttttaggatttttaccatataacattaaccctgctaaagtgtttatgggagatacaggtagcttagctttaggtggtatatttgctaccatttcaatcatgcttaatcaggaattatcattaatttttataggtttagtattcgtaattgaaacattatctgttatgttacaagtcgctagctttaaattgactggaaagcgtatatttaaaatgagtccgattcatcatcattttgaattgataggatggagcgaatggaaagtagttacagtattttgggctgttggtctgatttcaggtttaatcggtttatggattggagtgcattaagatgcttaattatacagggttagaaaataaaaatgtattagttgtcggtttggcaaaaagtggttatgaagcagctaaattattaagtaaattaggtgcgaatgtaactgtcaatgatggaaaagacttatcacaagatgctcatgcaaaagatttagaatctatgggcatttctgttgtaagtggaagtcatccattaacgttgcttgataataatccaataattgttaaaaatcctggaataccttatacagtatctattattgatgaagcagtgaaacgaggtttgaaaattttaacagaagttgagttaagttatctaatctctgaagcaccaatcatagctgtaacgggtacaaatggtaaaacgacagttacttctctaattggagatatgtttaaaaaaagtcgcttaactggaagattatccggcaatattggttatgttgcatctaaagtagcacaagaagtaaagcctacagattatttagttacagagttgtcgtcattccagttacttggaatcgaaaagtataaaccacacattgctataattactaacatttattcggcgcatctagattaccatgaaaatttagaaaactatcaaaatgctaaaaagcaaatatataaaaatcaaacggaagaggattatttgatttgtaattatcatcaaagacaagtgatagagtcggaagaattaaaagctaagacattgtatttctcaactcaacaagaagttgatggtatttatattaaagatggttttatcgtttataaaggtgttcgtattattaacactgaagatctagtattgcctggtgaacataatttagaaaatatattagcagctgtgcttgcttgtattttagctggtgtacctattaaagcaattattgatagtttaactacattttcaggaatagagcatagattgcaatatgttggtactaatagaactaataaatattataatgattccaaagcaacaaacacgctagcaacacagtttgccttaaattcatttaatcaaccaatcatttggttatgtggtggtttggatcgagggaatgaatttgacgaactcattccttatatggaaaatgttcgcgcgatggttgtattcggacaaacgaaagctaagtttgctaaactaggtaatagtcaagggaaatcggtcattgaagcgaacaatgtcgaagacgctgttgataaagtacaagatattatagaaccaaatgatgttgtattattgtcacctgcttgtgcgagttgggatcaatatagtacttttgaagagcgtggagagaaatttattgaaagattccgtgcccatttaccatcttattaaagggtgtgagtattgatggatgataaaacgaagaacgatcaacaagaatcaaatgaagataaagatgaattagaattatttacgaggaatacatctaagaaaagacggcaaagaaaaagatcaaaggctacacatttttctaatcaaaataaagatgatacatctcaacaagctgattttgatgaagaaatttacttgataaataaagacttcaaaaaagaagaaagcaatgataaaaataatgattctgcttctagtcatgcgaatgataataatatcgatgattctacagactctaatattgaaaatgaggattatagatataatcaagaaattgacgaccaaaatgaatcgaatgtaatttcagtcgacaacgaacaacctcaatcagctcctaaagaacaaaatagcgactcgattgatgaggaaacagtaacgaaaaaagaacgaaaaagtaaagtaacacaattaaagccattaacacttgaagaaaagcggaagttaagacgtaagcgacaaaagcgaatccaatacagtgttattacaatattggtattgttgattgctgttatattaatttacatgttttcaccacttagtaaaattgcgcatgtaaatataaatggaaataatcacgttagtacttcaaagataaacaaagttttaggtgttaaaaatgattcaaggatgtatacgtttagtaaaaaaaatgctattaatgatctcgaagagaatccattaatcaaaagtgttgagatacacaagcaattaccaaacacattaaacgtagatatcacagaaaatgaaattattgctttagtgaaatataaaggtaaatatttacctttattagaaaatggtaaattgcttaaaggttcaaatgatgtcaaaattaatgatgcacctgtcatggatggtttcaaaggtacaaaagaagatgatatgattaaggcgttatctgaaatgacacctgaagttagacgatatattgccgaagtgacatacgccccaagtaaaaacaaacaaagcagaattgaattgtttacgacagatggacttcaagtaatcggtgatatttcgacgatatctaagaaaatgaaatattatccgcagatgtcacaatcattatcaagggatagttcgggtaaactaaaaacacgaggctatattgatttatcagtcggtgcttcatttatcccataccgtggaaacacgtctagtcaatcagaaagcgataaaaatgtgactaaatcatctcaagaggaaaatcaagcaaaagaagaattacaaagcgttttaaacaaaattaacaaacaatcaagtaagaataattaaaaaattttgatattgtctatgtttatagttcacaagccattcaacgtattgtaaactaaggatagtgtatttttttaatagtaatttgtcaggaggtgcctatctatggaagaacattactacgtaagtattgatattggatcatcaagcgtaaaaacaatagtaggcgagaaatttcacaatggtataaatgtgataggtacaggacaaacctacacgagcggtataaaaaatggtttaattgatgattttgatattgcgcgacaagcaatcaaagacacaattaaaaaggcatcaatcgcttcgggtgttgatattaaagaagttttcctgaaattacctatcattggaacggaagtttatgatgaatcaaatgaaatcgacttttatgaggatacagaaatcaacggttcacatatcgaaaaagtattagaaggtattagagaaaaaaatgatgtgcaagaaacagaagtaattaatgtgttcccgattcgttttatagtcgataaagaaaatgaggtttcagaccctaaagaattaattgccagacattcattaaaggttgaagcaggcgtaattgctattcaaaaatcgattttaattaatatgattaaatgcgtagaagcatgtggtgttgatgtattagatgtttactctgatgcatataactatggttcaatcctaacagctactgaaaaagagttaggtgcatgtgtcattgatattggtgaagacgttacgcaagttgctttttatgaacgcggtgaattagtagatgctgattctatcgaaatggcagggcgtgatattacagacgatattgcacaaggattaaacacttcttatgaaactgctgaaaaagttaaacaccaatatggtcatgcattctatgattctgcttcagatcaagatatcttcactgttgaacaggttgatagtgatgaaacagtacagtatactcaaaaagatttgagtgactttattgaagcgcgtgtagaagaaatattcttcgaagtatttgatgttttacaagatttaggattaacaaaagtaaatggtgggtttattgtaactggtggatctgcaaacttacttggcgtaaaagaattattatcagatatggtaagtgaaaaagttagaattcacacgccatcacaaatgggaattagaaaacctgaattttcttcagcaatttctacaatttctagtagtatcgcttttgatgagttattagattatgttacaattaattatcatgataatgaagaaactgaagaagatgttattgatgtgaaagacaaagataacgaatctaaattaggcggatttgattggtttaaacgtaaaacaaacaaaaaagatactcatgaaaatgaagtagagtcaacagatgaagaaatttatcaatcagaagataatcatcaggaacataaacagaatcatgaacatgttcaagacaaagataaagataaagaagaaagtaaattcaaaaaactaatgaaatctctatttgaatgattattggccaataaaactaggaggaaatttaaatgttagaatttgaacaaggatttaatcatttagcgactttaaaggtcattggtgtaggtggtggcggtaacaacgccgtaaaccgaatgattgaccacggaatgaataatgttgaatttatcgctatcaacacagacggtcaagctttaaacttatctaaagctgaatctaaaatccaaatcggtgaaaaattaacacgtggtttaggagcaggagctaatcctgaaatcggtaaaaaagctgcagaggaatctcgtgaacaaattgaagatgcaatccaaggtgcagacatggtatttgttacttctggtatgggtggcggaactggtactggtgcagcaccagtcgttgctaaaattgcaaaagaaatgggcgcattaactgttggtgttgtaactcgtccatttagttttgaaggacgtaaacgtcaaactcaagctgctgctggagtagaagctatgaaagctgcagtagatacattaatcgttataccaaatgaccgtttattagatatcgttgacaaatctacgccaatgatggaagcatttaaagaagctgacaacgtgttacgccaaggtgtacaaggtatctcagacttaatcgctgtttctggtgaagtaaacttagactttgcagacgttaagacaattatgtctaaccaaggttctgcattaatgggtattggtgtttcttctggtgaaaatagagcggtagaagctgctaaaaaagcaatctcttctccattacttgaaacatctatcgttggtgcacaaggtgtgcttatgaatattactggtggcgagtcattgtcattatttgaagcacaagaggctgctgatattgtccaagatgctgcagatgaagacgttaatatgattttcggtacagttattaatcctgaattacaagatgagattgttgtaacagttattgcaactggttttgatgacaaaccaacatcacatggtcgtaaatctggtagcactggattcggaacaagcgtaaatacttctagcaatgcaacttctaaagatgaatcattcacttcaaattcatcaaatgcacaagcaactgatagtgtaagtgaaagaacacatacaactaaagaagatgatattcctagcttcattagaaatagagaagaaagacgttcaagaagaacaagacgttaatcggttaatatatatacacaaataattcaacacaaatcatcagataacatatctgatgatttttttactaatttttagaacatgtagaaggacatttaagtttttcaaagttattaaaagtgtttaagtatcgtgtgaaaattaagtcaaaaattatttgcgcaacattttaactttaaacataaatgttatattatataattattaactttgtacagttagacgaagataatttaaatgaaatgatggtgacgatcgagtgaatgataattttaaaaagcaaccgcatcatttaatatatgaagagttattacaacaaggtattactctaggtattacaactagaggagatggtttaagtgactatcctaaaaatgcttttaatatggcgagatatattgatgatcgcccatataatattactcaacatcaattgcaattagctgaagaaattgcgtttgatagaaaaaattgggtgtttcccattcaaacacatgaaaataaagtcgcttgtattacaaaggatgatataggcacaaatatagacactttaactgatgcgcttcatggtattgatgcgatgtacacatatgatagtaatgtcttattaacgatgtgttatgcagactgtgtaccagtatatttttatagtacaaaacatcattttattgcattggcgcatgcaggttggcgtggtacctatactgaaattgtaaaagaagtgctaaaacatgtgaactttgatttgaaagacttacatgtcgttattggaccatctacatcatcaagttatgaaattaatgatgatattaaaaataaatttgaaacattgccaattgatagtgccaactatattgaaactagaggacgagatcgtcatggtattgatttgaaaaaagccaatgctgcattattaatttattatggtgttcctaaagaaaatatttatacgacagcgtatgctacatctgaacatttagaattatttttctcttatcgattagaaaaaggtcaaacaggacgcatgttagcattcattggtcaacagtaaacaaggaggagatatgtttgcgtgtgaaagataatttacaacaaatctcaacacaaattaatgacaaaagtgaaaaaaataatttttcaacaaaaccaaacgtgattgcagttacaaaatatgttacaatagagcgagctaaagaagcgtatgaggctggaataagacattttggtgagaatagattggaaggcttttttcaaaagaaagaagcattaccatcagatgcggtgatccattttataggatcattacaatctcgaaaagttaaggacgttataaacgacgtagattatttccatgctttagatcgattgagcttagccaaagaaattaacaaacgtgcagaacataaaattaaatgtttcttgcaagtgaacgtttcgggagaagcttctaaacatggtattgctttagaagatgttgatcagtttatagatgatcttaaaaaatatgacaaaatcgaaattgtaggtttaatgacgatggcaccattgacagatgatgaagcatatattagatcgttatttaaacagttacgtttgaaaaaagaagaaatacaacgactcaatttagaatatgcgccttgtgatgaattatcaatgggaatgagtaatgactatcttattgcagttgaagaaggtgcgacgtttgttagaattgggactaaacttgtaggagaagaggagtgagccacttggctttaaaagatttatttagtggattttttgtaatagatgatgaagaggaagtagaagtacctgacaaacaacaacaggtaaatgaagcgccagcaaaagagcagtcacaacaaacaacaaaacaaaacgcaatcaaatcagtccctcaaaaatctgcatcaagatatacaacaacgtcagaagaaaggaataaccgtatgtctaattattcaaaaaataattcacgtaatgttgtaactatgaacaatgctacaccaaacaatgcatcacaagaaagttcaaaaatgtgtttattcgaaccacgtgttttttcagatacacaagatattgctgatgagcttaaaaaccgccgtgcgacacttgtcaatttacaacgtattgataaagtatcagcgaaaagaattattgattttttaagcggtactgtttatgcaatcggtggagatatccaacgtgtaggtactgatattttcttatgtacgcctgataatgtggaagtagctggaagcattacagaccatattgaaaatatggaacattcattcgactaaggagttaacatatggatataaatgtgctagctacaatatttaaattcatcctttttgttgttgaaatttattatttcggcatgattatatatttctttacatcttgggtaccaagtattagagaaactaaggtaggttattttttagcgaaaatatatgaacctttcttacaaccatttagaaaagtaattccacctattggaattatcgacatatcatcaatcgctgcaattatcgttttagtattattccaaaaagggttactccaaatctttaattggattttaattcaattacaataaattaagcgacataacgaggcaagggtacatgatactttagcctcgtttttgatatgcatttttctgaatataagggcaatagatggtattttataatttttttaaggtagtgattaacatagatatttatcaacactttagacaggaagaatacgaattaattgatcagctaacggataaatgtgatcaagcggaacagcattatgcaccagtattaacgcattttttagatccaagagggcaatatatattggaagtgatttgtggcagttatgaagatttaaacgtatctttttatggtggacctaatgctgaaagaaaaagagcaatcatttcgccgaactattatgaacctaaagaaagcgactttgaattaactttaatggaaatagattatcctgaaaaattcgtcactttaaaacatcaacatattttagggacattaatgtctttaggtatcgaacgcgaacaagttggagatataattgtgaatgaacgaattcaatttgttttgacaagtagattggaatcatttattatgttagaattacaacgtattaaaggcgcatcagttaaactttatactattccagtaacagatatgatacaatctaatgagaattggaaaaatgaaagtgcaacagttagttctttaaggttagatgttgttattaaagaaatgatacgtaaatcacgtacgattgcgaaacaactaatcgaaaaaaaacgtgttaaagtgaatcacactattgttgattcagcagattttcaattacaagcaaatgatttaatatccatccaaggttttggtagagcacacattactgacttaggtggtaaaactaaaaaagataaaacgcacattacctatagaacattattcaaatagtaatgatttaaggaggataacaaatgccttttacaccaaatgaaattaagaataaagagttttcacgtgtaaagaatggtttagaacctactgaagttgctaattttttggagcaactaagcactgaaattgaacgtcttaaagaagataaaaaacaacttgaaaaagtaatcgaagagagagatactaatattaagtcttatcaagacgtgcatcaatctgtaagtgatgctttgatacaagctcaaaaagctggtgaagaaactaagcaagctgcagagaaacaagctgaagcgattatagctaaggcagaagcgcaagctaatcaaatggttggtgacgcggtagaaaaagcacgccgtttagcattccagactgaagatatgaaacgtcaatcaaaagtatttagatcgcgtttccgtatgttagttgaagcgcaattagacttattaaaaaacgaagattgggattacttgttgaattatgatttagacgctgaacaagtgacgcttgaaaatattcatcatttgcatgaaaatgatttaaagccagatgaagttgcagcaaatgcacaaaataatgcatcaaatacaccagacaataatcaacaatccaatgattcagaaacaactaagaagtaagaattaaataaagacagacgcgtaatatacatttaacttttcacagcgaattaggtaatggtgagagcctagtaaaagcatgtatgttatatcactggctttttaatatttaaataatgtaatgagagaactctaagttgagttaataagggtggtaccgcgagcaatcgtcccttttaatttaacttagagttttttaaatttttaaggagtgaaaaaaatggattacaaagaaacgttattaatgcctaaaacagatttcccaatgcgaggtggtttaccaaacaaggaaccgcaaattcaagaaaaatgggatgcagaagatcaataccataaagcgttagaaaaaaataaaggtaacgaaacattcattttacatgatggcccaccatacgcgaatggtaacttacatatgggacatgccttgaacaaaattttaaaagactttattgtacgttataaaactatgcaagggttctatgcaccatacgtaccaggttgggatacacatggtttaccaattgaacaagcattaacgaaaaaaggtgttgaccgaaagaaaatgtcaacagctgaattccgtgagaaatgtaaagaatttgctttagaacaaattgaattacagaaaaaagattttagacgtttaggtgttcgtggtgactttaatgatccatatattacattaaaacctgaatacgaagctgcacaaattcgtatttttggagaaatggcagataaaggtttaatttataaaggtaaaaagccagtttattggtctccttcaagtgagtcttcattagcagaagcagaaattgaatatcacgataaacgttcagcatcaatttacgttgcatttgacgttaaagatgacaaaggtgtcgttgatgcagatgctaaatttattatctggacaacaacgccatggacaattccatcaaatgttgcgattaccgttcatcctgaattaaaatatggtcaatacaatgtaaatggcgaaaaatatattattgcagaagccttgtctgacgctgtagcagaagcactggattgggataaagcatcaatcaaattagaaaaagaatacacaggtaaagaattagagtatgttgtagcacaacatccattcttagacagagaatcgttagtgattaatggtgatcatgttactacagatgctggtacaggttgtgtacatacagcaccaggtcacggggaagatgactatattgttggtcaaaaatatgaattgccagtaattagtccaatcgatgataaaggtgtatttactgaagaaggcggccaatttgaagggatgttctatgataaagctaataaagccgttactgatttattaacagaaaaaggtgcactattaaaattagactttattacacatagctatccacacgactggagaacaaaaaaacctgtaatcttccgtgctacaccacaatggtttgcctcaatcagtaaagtaagacaagatattttagatgcaatcgaaaatacaaacttcaaagtaaattggggtaaaacacgtatttacaatatggttcgtgaccgtggcgaatgggttatttctcgtcaacgtgtgtggggtgtaccgttaccagtattttatgctgaaaatggcgaaattatcatgacgaaagaaacagtgaatcatgttgctgatttatttgcagaacacggttcaaatatttggtttgaaagagaagcgaaagacttactaccagaaggatttacacatccaggcagccctaacggtacatttactaaagaaacagacattatggacgtttggtttgattctggttcatcacaccgtggcgtgttggaaacaagaccggaattaagtttcccagcggatatgtatttagaaggtagtgaccaatatcgtggttggttcaactcttctatcacaacttcagttgctacaagaggagtatcaccttataaattcttactttctcatggttttgttatggacggtgaaggtaagaaaatgagtaaatctttaggtaatgtgattgtacctgaccaagtggttaaacaaaaaggtgctgatattgcgagactttgggtaagtagtacggactatttagctgatgttagaatttctgatgaaattttaaaacaaacatctgatgtttatcgtaaaatcagaaatacattaagatttatgttaggtaacattaacgatttcaatcctgacacagatagcattcctgaatcagagttattagaagtggatcgttacttgctaaatcgtttacgtgaatttactgcaagtacgattaacaactatgaaaactttgactacttaaatatttatcaagaagttcaaaactttatcaatgttgagttaagtaatttctatttggattacggtaaagatattttatatattgaacaacgtgattctcatatccgtcgtagtatgcaaacagtgttatatcaaattttagttgatatgacgaagttgttagcaccaatcttagtgcatacagctgaagaagtttggtctcatacaccacatgttaaagaagaaagtgttcacttagcagacatgcctaaagttgtagaagtagatcaagctttattggataaatggcgtacatttatgaatttacgtgatgatgtgaaccgtgcattagaaactgctcgtaatgaaaaagttattggtaaatcattagaagctaaagttacgattgctagtaacgataaatttaatgcatctgaattcttaacttcatttgatgcattacatcaattatttatcgtgtcacaagttaaagttgtagataagttagacgatcaggcaacagcttatgaacatggtgatattgtcatcgaacatgcagatggtgaaaaatgtgaaagatgttggaactattcagaggatcttggtgctgttgatgaattgacgcatctatgtccacgatgccaacaagttgtaaaatcacttgtataattgaaattgtataaagtactcatacagatgatataaattaaagctctcttcataatcatgttgtagtttttgttgacatgatgaagagagtttttttgtgaataaaaaaatgaccaagttaccggtcatatatgtaaaaaatgtgcgatttactaaaataaaaattattcaggaatggtacaaattctctgaggcatataaatgcgttatagttgctattctcaattatgttcgcgataattttaagtaaaagtaagcacagatattgaatttgataggagttaattgaatgtatcataacagtaacgcaaactttgtcaatggtatcactttaaatgtgagagataagaatgaattaaagccattttatgaggacatattaggattaaatattataaatgagacattaacatcgatacaatatgaagtaggtcaaaataatcatgtcattacacttgttgaattacaaaatggacgtgaacctttaatgtccgaagcgggactgtttcatatcgcaattaaactacctcaaattagtgatttagctaatttactaattcatttaagcgaatatgatattccagttaacggaggtatacagcctgcttcgttatcattattttttgaagacccggaaggaaacggttttaaattttatgttgataaagacgaagcgcaatggacgaggcaaaataatttagtaaaaattgatattagaccattaaatgtaccgagattagtgagtcatgcaacaaaattgttatggttaggtattccagatgacgctattataggtgcattgcatattaagacaattcatttatcagaggtaaaagagtactacctcgattattttggattagagcaatcggcatatatggatgattattcaatatttttagcatcgaatggctattatcaacatttggccatgaatgattgggtatcagcaacgaaacgtgtagaaaattttgatacgtatggattagcaattgttgactttcattatcctgaaacaacacatttaaatttacaaggtccggatggtatctattatcgctttaatcatatcgaagttgaagattagtatatactttgaatggacgaaccatataatgaatcgtttttaatgatctttttatacaagttatgaaggaggctgggacattaagttcttaggcaatgtaaaaagctgatttctattaattatttgatagaaatcagcttttttgatatgtattttataatgtacagctcgttgagctgctattttccttatattaattgccattaatacaaaacctagctctcgtttaactttatttattcctcgaactgacattcgagtgaaactcaaaatagcctactttcttaaattaacaatatctattctcatagaatttgtccaattaagtgtagacgattcatgtcttatttttttaaagtatttaaaagtaaaattacatgttaatacgtagtattaatggcgagactcctgagggagcagtgccagtcgaagaccgaggctgagacggcaccctaggaagggacccatcatcaaaaattctatttatagaattttacagtaatgtgccagatgggcatagcgaagccattcaatacgaagtattgtataaatagagaacagcagtaagataatttttaattagaaaatatcttactactgtctttttagggatttatgttccagcctgctttcctaatttttaatgtcatcttaaatatgataaatgaataattaagttcatatttaatgtcaaaacatagtagtttatcaagtattgagttagtaacattagatttaatgtaatatgcttactttttttattagcaggtgtaagctataatataaagagttgtctcatggacgattgattggaggaacgaaaatgcacaaaaaatattttattggcacttccattttaatagcagtatttgtcgttatatttgaccaagttactaaatatattatagctactacaatgaaaattggagattcatttgaagtgataccgcactttttaaacataacatcacatcgaaataatggtgctgcatggggaatattgagtggaaaaatgacatttttctttattattaccattattatattaatagccttagtatatttctttattaaagatgctcaatataatttgtttatgcaagttgctattagtttactttttgcaggtgcacttggaaactttattgatagaattttaacaggagaagttgttgactttattgatacaaatatttttggttatgattttccaatatttaatatcgcagattcaagtttaacaattggtgtaatattaattattattgccttattaaaggatacttccaataaaaaggagaaggaggttaagtaatggagacttatgaatttaacattacagataaagaacaaacaggtatgcgtgtagataagttgctgcctgaattaaataatgattggtctcgtaaccagatacaagattggattaaagcaggtttagtcgttgcaaacgataaagttgttaaatctaattataaagtgaaacttaatgatcatatagttgtcactgaaaaagaagtggttgaagctgatattctacctgaaaatttaaatttagatatttattatgaagatgacgatgttgcagttgtatataaaccgaaaggcatggtagttcatccatcaccagggcattataccaatacattagttaatggtttaatgtatcaaattaaaaatttgtcaggtattaatggagaaattcgtccaggtattgttcaccgtatagatatggatacttctggtttattaatggttgctaaaaatgatattgctcatcgtgggcttgtagaacaattaatggataaatctgttaaaagaaaatatatcgctttagttcacgggaatattcctcatgattacggtacaatcgatgcgccaattggtagaaacaaaaatgatcgtcaatctatggctgttgttgatgatggtaaggaagcagtgacacattttaacgtactagaacattttaaagattatacgcttgttgaatgtcaacttgaaacaggacgtacgcatcaaatccgtgttcacatgaaatatattggcttcccattagttggtgatccaaagtatggaccgaaaaagacattggatattggtggtcaagctctacatgctggacttattggattcgaacatccagtaacaagtgaatatattgaaagacatgctgaattaccacaagactttgaagatttattagatacaattcgaaaaagagatgcataattgtgtcgtgctataattacgataacattattatgtaaactataagtgtttatcgttttcgtttttttaaatgaaaacacattataaaatagattaaggttaacatttttactgagtatggttaatttttcaatatagattgacaaagcgcctgattagtattatccttataacagtttaagtacaacataaagagtctttaattgagcgtccagagagacgtcaaagacatgaaaatatagatatatactaaaatgatcataacactttcacatatgcaagaataagtagtaatactacgattcttctatgtaaataggctgattgtatatactaaacctcatgtcgatattaaagacatgaggttttttgtttctaaattttgaaagggtgagaatatgtctgaacgtatcataatggatgatgccgcaatacaacgtacagtgacgagaatcgctcacgaaattttggagtataacaaaggtactgataatttaattcttttaggtatcaaaacaagaggtgaatatttagcgaatcgtatacaagataaaattcatcaaattgagcaacaacgtatacctactggaacaattgatattacatactttagagatgatatagagcacatgtcatcacttacgacaaaagacgcaatagacatcgacacagatattacagataaagtagtcatcattattgacgatgtgctgtatactggtcgaacggttcgtgcttcacttgatgctattttgctaaatgctagacctattaaaattggtttagctgctttggttgatcgaggacatcgtgagttaccaattcgagcagattttgttggtaaaaatatacctacttctaaagaggaaacggtaagtgtctatttagaagaaatggatcaaagaaatgcagttataattaaataataccccttttaattcagtacgagagactgaaaaaggtgggggagttgaatgataaataagttttcatatgcttgtttatctaataataccctcatgttcgacaactataagtcaatttctatggacgaaaatgacttgtagcaacttgtcacactttttgtctctttacatatactgatgtaaagagatttttttattatcggaggaaatgaatattatgcaaaatgatgaaatgtttgaacgaacagtaaaacccgtactagatgtaaatgaaaaaccacaaccagcgcaatgggcatttttaagcttacaacatttatttgcgatgtttggcgcaacagtactagtaccattcttaacaggactaccaatatcagcagcgttactagcttcgggaatcggtacattactttatatcttaataacgaaggcgcaaataccagcatacttgggatctagctttgcatttatcacgccaattatcacgggattaagtacgcatagcttaggagacatgcttgtagcattattcatgagtggtgttatgtacgtcatcatcgggattctaatcaaattaagtgggacagcatggttaatgaaattattaccaccagttgttgttggaccagtcatcatggtaattggtttaagcttagcgcctactgcagtcaatatggcaatgtatgaaaatcctggagatatgaaaggttacaatatcagtttcttaattgttgcaatgataaccttgcttgtaacaatagtcgttcaaggattttttaaaggattcctatctttaattccagttcttgtaggtattatcgtaggttatgtggtagcgatttttatggggattgtgaaatttgatgcaattatgtcagcaaaatggatagatttccctcatatttatctgccatttaaagattatgtaccttcatttcacttaggacttgtacttgtaatgattccgattgtgttcgtaacagtaagtgaacatattgggcaccaaatggtattgaataaaatcgtaggtagaaacttctttgaaaagccaggacttgataaatcaatcattggtgatggtgtttctacaatgtttgccagtattattggtggaccaccaagtacaacatacggtgaaaatatcggtgtattagcgattaccagaatatacagtatttacgtcattggtggtgcagcagttatagcaattgttttagcattcattggtaagttcactgcattaatttcttctatacctacaccagttatgggaggagtatctatattacttttcggtattattgcagcaagtggcttaagaatgttagttgaaagcaaagtagattttgcgaacaatcgaaatttagttatagcttctgtaattttagttgtaggtatcggtaatttagtatttaacttaaaagaaattggtatcaaccttcaaattgaggggatggcattagctgcactttcaggaattattttgaacttaatcttacctaaagagaaaaaacaaaacaattaagatttacaaattaaggagggcgcttttatgaatcatttattatcaatggaacatttatctacagatcaaatatacaaacttatccaaaaggcaagtcaatttaaatctggtgaacgtcaactaccaaactttgaagggaaatatgtcgcaaatttattctttgaaaattctactcgaacaaaatgtagttttgaaatggcagaacttaagctagggttaaaaacgattagctttgaaacatcaacatcatctgtttcaaaaggtgaatctttatatgacacatgtaaaactttagaaagtattggctgtgatttattagtcattagacatccgtttaataactactatgaaaaattagcgaatattaacatcccaattgcgaatgctggtgatggtagtggacaacatccaacacaaagtttacttgatttaatgacgatatatgaagaatatggatattttgaaggcttgaatgtattgatttgtggagacattaaaaattcacgtgtcgcacgtagtaattaccatagtttaaaagcattaggtgcaaacgtaatgtttaatagcccaaatgcttggattgatgattctttagaagcaccttatgtaaatatagatgatgttatagaaacagtagatatagttatgttattaagaattcaacatgaaaggcatgggcttgcagaagaaactagatttgcagcagatgattatcatcaaaagcatggcttaaatgaagtacgctataacaaattacaagaacatgctattgttatgcatccggcacctgtgaatagaggagtagaaatacaaagcgatttagtagaagcttcaaaatcaagaatttttaagcaaatggaaaatggcgtttacttaagaatggcagtcattgatgaattattaaaataggtaaggggacgaaaatgatgaaattaattaaaaacggtaaagtattacaaaatggcgaattacaacaagcagatattttaattgatggtaaggtaattaaacaaattgcacctgcaattgaaccaagcaatggtgttgacatcatagatgcgaaaggtcactttgtgtcacctggatttgtcgatgttcatgttcatttacgtgaacctggtggtgaatataaagagacaattgaaactggtactaaagctgctgctagaggcggatttacaactgtatgtccaatgcctaacacaagaccggtaccagattctgtagaacattttgaagctttacaaaaattaatcgatgacaatgctcaagtacgtgtattaccttatgcttcaattacaacacgtcaattaggtaaagaattggttgatttcccagcactagtaaaagaaggtgcctttgcgtttacagatgacggtgtaggagtacaaactgcaagcatgatgtatgaaggcatgattgaagctgcaaaagtaaacaaagccatcgtagcacactgtgaagataattcattaatctatggtggtgcaatgcatgaagggaaacgcagtaaagagttaggtataccaggtattccaaacatttgtgaatctgttcaaatcgcaagagatgtactattagctgaagcagcaggttgtcattatcatgtatgtcatgtttctactaaagaaagtgttagagtcattcgtgacgctaaacgcgcaggcattcatgttacagctgaagttacaccacaccatttattgttaacagaagatgatattcctggtaataatgccatttataaaatgaatccaccattgagaagtactgaagatagagaggctttgttagaagggttactagacggtacaattgactgtatcgcaacagaccatgcaccacatgcacgtgatgaaaaagcacaaccaatggaaaaagcaccattcggaattgttggtagtgaaacagcattcccattattatatacgcattttgtaaaaaatggtgattggacattacaacaattagtagattacttaacaattaaaccatgtgagacatttaatttagaatacggcacattaaaagaaaatggttatgcagatttaacaatcattgatttagatagtgaacaagaaattaaaggagaagatttcttatcaaaagcagataatacaccatttatcggctataaagtttatggaaatccgatcttaacaatggttgaaggcgaagttaaatttgagggggataaataatatgcaaagcaaacgttatctagtgttagaagacggttctttttacgaaggctaccgtttaggatctgataacttaactgtaggagaaattgtatttaatacagcgatgacaggttatcaagaaactatttcagatccatcatatacaggtcagatcattacttttacgtatccattaatcggtaattatggtatcaatagagacgattttgaatcattagtacctacattaaacggtattgtagtgaaagaagcgagtgcgcatccaagtaattttagacagcaaaagacacttcatgacgttttagaattgcatcaaattccagggattgcaggtgttgatacaagaagtattacgcgtaaaattcgacaacacggtgtgttaaaagctggttttactgatcgaaaagaagatattgatcaacttgtcaaacatttacaacaagtagaattacctaaaaacgaagtagaaatcgtttcgactaaaacaccgtatgtttcgacaggtaaggatctaagtgtcgtacttgtagactttggtaagaagcaaaatattgttcgagaattaaacgtcagaggttgtaacgtcacagttgtaccatatacaactactgccgaagaaattttagcaatggctccagatggcgttatgctatcaaacggaccaggtaatcctgaagttgtagaatgtgcgattccaatgattcaaggaattttagggaaaattccgttctttggtatctgtctaggacatcaactttttgcattatctcaaggagcaagctcatttaaaatgaagtttggtcatcgtggtgcgaaccatccagttaaaaatttagagactggaaaagttgatattacgagtcaaaaccatggatatgcaatagatatagattcgttaaaaagtactgatttagaagttactcatcttgcattaaatgatggtactgtagaaggtttaaaacataaaacattaccagcattttctgttcaataccatcctgaagcaaatccaggaccgtcagattcaaactatctatttgatgattttgtagcaatgatgactaattttaaggaaaaggagcgtcatatcaatgcctaaacgtaatgatatcaaaacaattttagtaatagggtctgggccaattatcataggtcaagcagctgaatttgattatgctggaacacaagcatgtctagctttaaaagaagagggatatcgagttattcttgtaaattcaaatccagcgacaatcatgactgataaggaaattgcggataaagtatatatcgaaccgttaactcatgattttatagcgcgaattatacgtaaagagcaacctgacgctttacttccaactttaggtggtcaaacaggtttaaacatggcgattcaactacacgaaagtggtgtgcttcaagataataacgtccaattattaggaactgagctaacatcaattcaacaagcagaagaccgtgaaatgtttagaacattaatgaatgatttaaacgttcctgtaccagagagtgacattgtaaatacagtagagcaagcctttaaattcaaagagcaagtgggatacccgctaattgttagaccggcatttacgatgggtggtaccggaggcggtatttgtcataatgatgaagaattacatgaaatcgtctcaaatggtcttcattatagtccagcaacgcaatgtttattagaaaaatctatcgcaggttttaaagaaatcgaatacgaagtaatgcgtgataaaaacgataatgccatcgttgtatgtaacatggaaaatattgatccagttggtattcatacaggcgattcaattgttgtggctcctagtcaaacattatcagatgttgagtatcaaatgttacgtgatgtttcattaaaagttattcgagctttaggtatcgaaggtggttgtaatgttcaattagcattagatccccattcattcgattattatattatagaagtaaatccgcgtgtatcacgttcatcagcgttagcttcaaaagcaacaggatatcctattgcaaaattagctgctaaaatcgcggttggtctaacattagatgaaatgttaaatccaattacaggaacatcttatgcagcgtttgaaccaactttagactatgtgatttcaaaaataccaagatttccttttgataaatttgaaaaaggagaacgagagcttggcacacaaatgaaagcaacaggtgaagttatggccattggtcgaacttacgaagaatcattgttaaaagcaattcgatcacttgagtatggtgtgcatcacttaggattaccaaatggtgaaagcttcgatcttgattatattaaagaacgtatttcacaccaagatgatgaacgattatttttcatcggcgaagcaattagaagaggcacaacattagaagaaattcataatatgactcagattgattacttcttcttacacaagttccaaaacattattgatattgagcatcaattaaaagagcatcaaggtgatttagaatatcttaaatatgcaaaagattatggatttagtgataaaacaatagcgcatcgctttaatatgacggaagaagaagtatatcaattgcgtatggaaaatgatattaaacctgtttacaagatggttgatacttgcgcagctgaatttgaatcttcaacaccatattattatggtacatacgaaactgaaaatgaatccatagttactgacaaagaaaaaatcttagtattaggctctggaccaattcgaatcggccaaggtgtagaatttgactatgcgacagttcacgccgtttgggcaattcaaaaagcagggtacgaagcgataattgtgaataacaatccagaaacagtttcaacagacttctcaatttctgacaaattatactttgaacctttaactgaagaagatgtgatgaatatcattaatttagaaaaacctaaaggtgtcgttgtacaatttggaggacaaacagcgattaatttagcagacaaattggctaaacatggtgttaaaatacttggtacttcactagaaaatctaaatcgtgctgaagatagaaaagaatttgaagcactattaagaaaaattaacgtgccacagccacaagggaaaacagctacatcacctgaggaagcattagcgaatgctgcagaaatcggatatccggttgtagtaagaccttcttatgtattaggtggtcgcgcaatggaaattgtagacaatgacaaagagttagaaaactatatgacccaggctgtaaaagcgagtccggaacatccggtactagtcgatagatatttaactggtaaagaaattgaagttgatgcgatttgtgatggagaaacggtcattattccaggaatcatggaacatattgaacgtgctggtgtgcatagtggtgactcaatcgctgtatatccaccacaaactttgacagaagacgagttagcaacacttgaggactatactataaaattagctaaaggtttaaacatcattggcttaatcaacattcaattcgttatagctcacgatggtgtgtatgttttagaagtaaatccacgttctagtagaacggtaccattcttaagtaaaattactgatattccaatggcacaattagctatgcgagcaatcattggggaaaaactaacagatatgggttatcaagaaggggttcaaccatatgctgagggtgtctttgtgaaagcaccagtatttagttttaataaattgaaaaatgttgatattactttaggacctgaaatgaagtcaacaggtgaagtgatggggaaagatactacattagaaaaggcgttattcaaagggttaacaggtagtggcgttgaagttaaagatcacggtacagtattaatgaccgtcagtgacaaagataaagaggaagttgttaaattggcacaacgcttaaatgaagttggctataaaattttagcaacgtctggaacagctaataaattagctgagtatgacatacctgcagaagtagtaggcaaaattggtggcgaaaatgatttattaacacgtattcaaaatggtgatgttcaaatcgttataaatacaatgactaaaggtaaagaagtagaaagggatggcttccaaattagacgtactacagttgaaaatggtattccatgtttgacatctttagatacagctaatgccttaacgaatgtaattgaaagtatgacatttacaatgcgtcaaatgtaaatcaatcaaactgtatcggtggggctgtaattaaccatttacttaaagaagtttatattacagcctcattattttaatgaatttcttaatataaagggagacatatatgatgaaagatttaccaattattgcattagattttgaatcaaaagaaaaagtaaatcaatttttagatttatttgatgaatcattattcgtaaaagtaggtatggaacttttttatcaagaaggtcctcaattaattaatgagataaaagaaagaggccatgatgtatttttagatttaaaactgcatgatattcctaatacagttggtaaggcgatggaaggactagctaaattgaatgttgatctggtaaatgttcatgctgctggtggcgtaaaaatgatgtctgaggccattaaaggattaagaaaacataatcaagatacaaaaattattgcagtaacacagcttacgtcaacaacagaagacatgttacgacacgaacaaaatatacaaacatcgattgaagaggccgttttaaattatgccaagttagcaaatgcagctggtttagatggcgttgtttgttcacctcttgaaagtcgtatgttgactgaaaagttaggtacatcatttttaaaagtaacaccaggtattagacctaaaggtgcatctcaaaatgaccaacaccgtattacgacaccggaagaagcaagacagcttggttcgacgcatattgtagtcggtagaccgattacacaaagtgacaatccagtcgaaagttatcataaaattaaagaaagttggttagtataatggctaaagaaattgcaaaatcattattagatattgaagctgtaacattatcaccaaatgatttatatacatggagttcaggtattaaatcaccgatttactgtgataaccgtgttacgttaggttatcctttagttcgaggcgcaatccgcgatggtttaattaacttaattaaagaacactttcctgaagtagaagttatttctggtactgcaacagctggtattccacatgcagcttttattgctgaaaaattaaaattaccaatgaattatgttcgttcatcaaataagagtcatggtaagcaaaatcaaatcgaaggtgctaaaagtgaaggtaaaaaagtagttgtgatagaagatttaatttcgacagggggatcttcagtcacagcagttgaagccttaaaactagcaggtgcagaagtattaggtgttgtagctatctttacttacggtttgaaaaaagcagatgatacatttagcaatattcaactacctttttacactttaagtgattacaatgaattaattgaagtagctgaaaatgaaggtaaaatttctagtgaagatatccaaacattagttgaatggagagacaacttagcataatatagacactagaaggaggaattcaacaaatgaatgacaaaacatctaatgatttatatgggaagataaaacattgtaacgaatttatcaatcattcaaatgattccaatctatctagtagtcacgatgtcgacgaaagttcaacgaagcaaaaacatataaaaaataaaacaactatagatcataatgatgatttatttaaacatgtaaaggatatattacgtaaacaagaacaaatttaaaaacaaaaaagctatagtgtttaatatcaggggctgcttaaccgcatccgaatattacaaacactatagcttttattatataaaaaatttattagcggataattaactttattaaaatccaaccaattaagaatacgagtaataggactaatactggaatcacataatgtaacataacgtccctcctttaacttaattttaattgtaatcaaatttgacaataagtcaaaacattaatacctatgataagtatcatttattaacatatgtatcatatttttaatcttgcgtaatttttatcgttaactatgtgatttaatcaacaggccaataagacgtttgtcattcgtgcacataacggtacgacgcgcttttgtcattttaattatgttaagataatagtagttatagaagttcaatctataggaggcatagcatggatattccaaaaatcacgacatttttaatgtttaataaccaagctgaagaagctgttaaactatacacaagcttatttgaagatagtgagattataacaatggctaagtatggtgaaaatggacctggtgatcccgggactgtacaacactcaatatttacattaaatggacaagtattcatggcgattgatgctaatagtggcacagaattaccaatgaatcctgcgatttcattatttgttacagtaaaagatactattgaaatggaacgactatttaatggattaaaagatgaaggtgccattttaatgccaaaaacgaatatgccaccatacagagagtttgcttgggttcaagataagtttggagtaagttttcaattagcattacctgagtaaaaggattcgcacagcgttgaatgataaagaaacactttttcttatgcatgcgttttacctatgtatttctattttaagtacacattagcattttagtttcactcatttttaaaatcacaaagataatttgtaacttaaatgatgatacgttatttaaaaacacgatacttcgtttcaatgaacgcattaaataataaataaacacctcaccataagaaaggactactttcttttgtgaggtgtttatttgtcgacaacttgattatgattgtttcattttttgaataagttcataatcaggtgtagcatacaaagttttttgattgtcatatgttacaaacccaggctttgcacctgatggtttatgcacatttttaattaatgtataatcaacaggtatttgtccagaattaccagcttttgaaaagtatcctgctaacatagccgcttccttgattgtcgtatcacttggtgcatcattaaatataacgacatgtgaaccaggaatatcttttgtgtgtaaccatgtgtgagtttttttagcttttttatttgttaaataatcattttgcttgttattcttaccaacatatatatcgtcgccatcagttgatacataatgttgtaattgaatctgcgctttctttttcttagtttgatttttacgctgtttcataaagccttgttctgctaattcatctctaatttcatcaatgtcatggacagaaatatgatgtaattgttgttcgattgttgaaaaataatctatattgtctttcgtcaattgaatttgatgttgtaattcacgttctctcgttttcatacgattatattgtttataataatattgagcatttgctgatggggattttgtaggatttaaaggaatgacaacttcttcattcgtataataattcaatgccgtcacttctttatcgccttgcttaattcgatatatattagcagtgatcaattcaccatataactgttcagtatctttatttttagactgctcatattcttcaatcaacttcgctaatttattttgatatttgtacaactgctgttgaacaaatcgaactaaatcattcgcacgttgtttaacgcgttcacgttcgccacgcgcatcataaaaacgatcaagcaaatcatttaatgaatcgtatgtaactgtatcatcattaaattgatttaactttataaaatagaaatcctctttacctgtttcatgatttttatgaaaaataggagtaggtggtaacttggtttctgccattacttcgtcaaatgcttctggtaatgttgatgaagtaataaattgacgacgactaacgatttcattcgtaattaaagggctaaatccttcaaactgattcaataattgtttagcaatattacctgcgttaaaatcgatatatttcaacacctctgcacctgtaatatcatacggatttattttgtgctgagtaggtggtgcttcataattaaatcctggcattactgtacgatagtgattcgtatttggtgttaagtgtttaaatccttcaattattttgcgattttcatctactaaaattaagttactatgtttacccataatctcaaggatgacagtgcggtaaatagtatcgccaatttcatctttactctttatatcgatttcaatgcgacgatcattaccaatttgcttaatcgattcgataataccaccttctaagtgttttctaaaaacacgcgcaaacatgggtggattaaatggattatcatattttttagtagtcaattgtaatcttgaaaagtttggatggattgacaataacaattgatggttttgtctattttgacgtacaaccattagtatcgtgtcattatcaggttgattgattttgtgaacgcgtcctgttgttaaaaattgtagagactcaaccattttctttgtaaataagccatcataagccataatttatcttccaccttcttcatatcattcgtttcattttaacatgattgtaacttttcagtatagttattgaaccatacattatgccatacattttacattatctaaaagtttgcaattcaatttatttaattaaaattaatcgtgcaatataacgatattgttagacttaatagaaattatggcatgcaatttcaaatatgctatacaatataaagaacaatgtgatatcatatttaaataatagaagattagcttagagaggtcgtaaggcatggataatgaaaaaggattgttaatcgttttatcaggaccatctggagtaggtaaaggtactgttagaaaacgaatatttgaagatccaagtacatcatataagtattctatttcaatgacaacacgtcaaatgcgtgaaggtgaagttgatggcgtagattacttttttaaaactagggatgcgtttgaagctttaatcaaagatgaccaatttatagaatatgctgaatatgtaggcaactattatggtacaccagttcaatatgttaaagatacaatggacgaaggtcatgatgtatttttagaaattgaagtagaaggtgcaaagcaagttagaaagaaatttccagatgcgctatttattttcttagcacctccaagtttagaacacttgagagagcgattagtaggtagaggaacagaatctgatgagaaaatacaaagtcgtattaacgaagcgcgtaaagaagttgaaatgatgaatttatacgattacgttgtagttaatgatgaagtagaacttgcgaagaatagaattcaatgtattgtagaagctgagcacttaaaaagagagcgcgtagaagctaagtatagaaaaatgattttggaggctaaaaaataatgttaaatccacctttaaaccaattaacgtcacaaattaaatcaaagtatttaattgcaacaactgcagcgaaaagagcgcgtgaaattgatgaacaacctgaaactgaattattaagtgaatatcattcatttaaaccagttggtagagcgttagaagaaattgctgacggtaaaattcgccctgttatttcaagtgattattatggtaaagaatagtttcgaccattaaaaatatgtgaagctagacgtacatcaaatacgtcaaggcatatccaaatcaaacgcacctatgtaggtgtgtttttttagtttatccaatgattgatgttataataatactaaatttgtatctataaaaaagtaatgagcatttgtgcgcatatgatgatgtaaagcgtaaatgtcatagtgatatttaagggagattgaatatgaagaaaatattattagccgttacaggtggcattgcggcatataaagcaattgatttgacaagtaagttaacacaatctgggtatgaagttcgcgttatgttaacgaatcacgcacaaaaatttgtgacaccattagcatttcaagcaataagtcgaaatgctgtttatacagatacttttatagaagaaaatccttcagaaatacagcatattgcattaggtgattgggcagatgcaatcattgttgcacctgcaacggcaaatacaattgcaaaattgagtgtaggtattgctgatgatttggtgacatcaacgttgctagcaacagagacaccgaaatttattgcgcctgctatgaatgtgcatatgtatgaaaataaacgtacgcagcaaaatattaatattttaaaagaagatgggtatcattttatcgaaccaggaagcggatttctagcatgtggttatgttgctaaaggacgtatggaagaaccgcttcaaatcgtttctgtaattgatgctcattttcaaaatagtaatcgtttagctaatagttcatttcaagataaacgcgcattggttacagcaggaccaactattgaagttatcgatccagtcagatttgtatccaatcgttcttctggaaaaatgggctatgcaatagctgaagcattgcgaaatcgaggagctatcgtgacgttagttgctggtcctacaacactagaggatccaaaagatattgaagttattcatgttcaaagtgctgaagaaatgtttgaacaagtgacaagccgatttgacgaacaagatattgttgtaaaagcagcagccgtatctgactatacaccggttgatgtattagaacataagatgaaaaagcaggatggtgatttgtcagtatcttttaaacgtactaaagacattcttaaatatttaggtgaacataaaacatcacagtatttaataggctttgcagcagagactgaagatattgaaaattatgcacaacaaaaattacgcaagaaaaatgcagatgtgattatttcaaataatgttggggatatgtctatcggatttagttctgatgataatgaattgacaatgcattttaaaaataatgaaaaagtaaatatcaagaaaggaaaaaaagtagtattagctgcacaaattttagatgaactagaaactaggtggcaataatgatagcgaaagtcatagtcgatgtcgcgtcgaagagcgttgactataaatttgattatataattcccgaacaactcgaatctgtcatccaacctggtgtgcgtgtaattgtaccttttggaccaagaacgattcaaggttatgtaatggaagtaacagcagaacctgatgcacaacttgacgtttcgaagttaaaaaaaatcatagaagtgaaagatatacaaccagaattaacatcagaattaatagctttaagtgagtggatgggttcaactcatgtcattaaacgtatttctatgctagaagtgatgcttccgagtgctattaaagcgaagtataaaaaagcatttaagatgaaagatgacatagagctaccttcagctttattacaaaaatttgataagcatggttactattattataaagatgcgcaaaaaaataatgatattcaattgcttatgaagttgttaaaagatgatatcgttgaagaaaaaacgattctcacacaaaatataactaaaaaaaccaagcgtgctgttcgtgtcattgaagggtatcatcctgatgaagtattagctaagttggagaaagttattaaacaatacgatttgtatgcttacttgtctgaagaacaacataaaacaatatttttaactgatattgaggatatgggcttttcaaaatccagtttagatggacttatcaaaaaaggttatgttgaaaaatatgacgcggttgttgaaagagacccatttaaagatcgtgttttcgaacaagaatcaaaacagcaattaacagaagaccaatataaagcatatgaagcgattaaagctaaaattgtaagccaagagcaagaaacatttttacttcatggtgtgacgggatcaggtaaaacagaagtatatttacaaacgatagaagatgttttaagccaaggaaaacaggcgatgatgttagttcctgaaatcgctctaacaccgcaaatggttttacgcttcaaacgtcgatttggtgatgacgttgctgtattacattctggcttatctaatggggaacgttatgatgaatggcaaaaaattagggatggtcgtgcgagagtaagtgttggtgcaaggtcaagtgtgttcgcacctttcaaaaatttagggttaatcatcattgatgaagaacatgaatctacatataaacaagaagattatccgagatatcacgctagagaaattgcccaatggcgaagtgaatatcatcactgtccagtcattttaggaagtgcaacaccatgtcttgaaagttatgcacgagctgaaaaaggcgtttatcatttgctatcattaccaaacagagtgaaccaacaagctttacctgaaattgatatagtagacatgcgtgaagaattgagtgaaggtaatcggtcaatgttttcaaaagatttacgtgaagccatacaattaagattagatcgacaggaacaagttgttttatttttaaatcgacgtggttatgcatcgtttatgttatgtcgggattgtggatatgtaccgcaatgtccaaactgtgatatttcattaacgtatcataaaacgacagacttattaaaatgtcactattgtggttaccaagagacgccaccgaatcaatgtccaaattgtgagagtgaacacattcgacaagtaggtactggtactcagaaagttgaagaactattgcaacaagaatttgaagatgcgcgcataattaggatggatgtagatacaacctcaaagaaaggtgcacatgaaaagttattgactgaattcgaaaaaggtaacggtgacattttactaggtactcagatgattgcgaaaggattagattatccaaatattactttagttggtgtgctgaatgcagatacaatgttaaatttacctgattttcgggcgagcgaacgtacttatcaactattaacgcaagtggctggtagagctggtcgtcatgaaaaggcaggtcaagtcatcattcaaacgtataatccagatcattattcaatattggatgttcaaaaaaatgattatttaacattttatcgtcaggaaatggaatatcgtaaattaggaaagtatccaccgtattattatttgattaatttcacaatctcacataaagaaatgaagaaggttatggtagcatcgcagcatgttcataaaattttattacagcatttaacagaaaaagcgcttgtactaggtccatctccggcagcacttgcgagaatcaacaatgaatttagattccaaattttagtgaaatataaaagtgaacctggattattacaagccattcagtttttagatgactattaccatgaaaaatttataaaagaaaaattagcattgaagattgatattgatccacagatgatgatgtaacattactaattattagaaacaagttcagtatgtacgagtatttgaaccagtgtttgaatatttactttaagtacagaaaaagggcagaatatacaactgttaactatttaaattagcagtttatattctgtctttttatatggctttataacttacgtgattttggtttgataaggaatttattagtattttcatttacgaattctgattttaatgcaagcgccatacttactgatgaataaaagtactaatgattaaacaaactatttttaaatggcaaattgaaatagtgcgaattttaaacttataaattaatggctataaactattttatatctatctatgttttaactacttaaattattagacaaaacaattttcttaaattatcaattaaagtatttaaaaatattgatggttaatgtaaaatatcaatataaataagttttttaaatttatgtatgtttatttgattcaaacaaaataacttaagaggagaaagtttatgaaaaagacactgggatgtttacttttaattatgcttttagtcgtagcaggttgttcttttggtgggaatcataaattatcatcaaagaaatcagaagaatcaaaacaagaaactgtaaaaaaagaatcggaagaagagaaagatccagatttagagaaatatgaagaaatagagaagaaaatgaaaggaattaaagatgcgccatctcttgataagttggatccattaatgacagaaaagtcgtttacgaatagtaaagggattcaaggatggaaagattacaaagaattaatgggtaaagtggaacttgcagattatagatttactaaagattcaaaaggatcttcaataaaagatgttgatgcattctttaaaggtaagaaaggtataaaaaggaaagtgattgaaacacacgatgatgtaaaacaagttgattattggtatgtagatccagatggaaagaaaattggcaattcaaacacacctgttttttacgcagaaattatgacaaaatataaagatggaaagttagtttatgcatcagtcgaaccaggatcttacgtaatacataaagatgatgcaattaaatatgacgattattctaagttaaaaaaattaagtcagctaactaaacttgatcatccaaaaccagttccatatagcgtagctcaaatcaaatctttcggagtacctttaacaagcgtttcatttatgacacatggatcaaaggatactaaagatgaagtgttgccggcattggcctatttcactttttcaccaaaaaattatgaagacaagtctaatccagatccaaaagttttaaatttagtacatatggatttcttaaatgcatctagtgattttggtaacgcacattttgttgttttaagtaaatatattaaagagtatgaatcaaactatgaaacagcgtcagatgattctttaaaatagtatttactgtgtgaaaaataaatagtgtactacattaaataatcgcaataataatcccgataaacaatcagcattactgcttatcacatagagttcgtaataactataactctatgattcgcaaataataaatgattgtcatcgggatttatttttatcaatttataaagtgacattaccttgttcatcagcaggtttgaaaacagtaatcactgcactaataattgctaaaatgtgtgggatacctgtccaacagaatattaagtgtagaataccttgcatattcttgccggcataaaatttatgaataccaaaactacctaagaacaatgctaataaaatataaataactttgtttacttgcatttctttccctccagttgaattgcttataatgacattagcttctctttttattatacccacttttagttcaaacattctagtttaagcattcccaatcatctaaatttcagttattcaatccttacaataaatttaggattacatttcagttgcattgtattattttacgtgtgaaatatacgtaatgaatcacatgacaatcttcaaattgaaaaatatacattctatgatgtaaggtcgcatttttaatatatttacgttataatagtttgatgaattttattgaggagtaagagttatggcgattaaaaagttagtaccagcatcgcatcctattttaacgaaaaaagcgcaagcagttaaaacatttgatgattcgttaaaaagattattacaagatttagaagatacaatgtatgcacaagaagctgctggcttatgtgcacctcaaattaatcagtcattgcaagtggcaattattgatatggaaatggaaggattattacaacttgttaatccgaaaattattagtcaatcaaatgaaacaataacagacttagaaggttcaattacattgccagatgtttacggcgaagtgacaagaagtaaaatgatagttgtcgaaagttatgacgtcaatgggaacaaagttgaactaactgcacatgaagatgtagcaagaatgattttgcatattatagatcaaatgaacggtatcccttttacagaacgtgcggaccgtattttaacagataaagaagtggaggcatattttataaatgactaaaataatatttatgggtacaccagacttttcaacaactgttttagaaatgcttattgcagaacatgatgtcattgcagtcgtaacgcaaccagatcgacctgttggacgtaaacgtgttatgacaccaccaccagttaaaaaagttgcaatgaaatatgatttacctgtatatcaacctgaaaaattaagtggatcagaagaattagaacaattgcttcaattagatgtagatttaattgtaactgctgcttttggacaattattacctgaatcattgttggcattaccaaatcttggggcaattaatgtacatgcatcattgttaccgaagtatagaggtggtgcaccaattcatcaggcaattatcgatggtgaacaagaaaccggcataacaattatgtatatggttaaaaaattagatgcgggtaatattatttcgcaacaagcaattaaaatagaagaaaatgataatgtcggtacgatgcatgataaattaagtgtattaggggcagatttattaaaagaaactttaccatctattatagagggcacaaatgaaagcgtacctcaagatgatacgcaagcaacatttgcttccaatattcgacgcgaagatgagcgaattagctggaataaaccaggaagacaagtgtttaatcaaattcgtggattatcaccatggccagttgcttatacaactatggatgacactaacttgaaaatatacgatgctgaactcgttgagactaataagataaacgagcctggaaccattatagaaacgactaaaaaagccattattgttgctacaaatgataatgaagctgttgcaattaaagatatgcaattagctgggaaaaagagaatgttagctgccaattatttaagtggtgcgcaaaacacactagtagggaagaaacttatatgatagaaaacgtgagaagtcttgcttttgacacgattcaagatatattaaatgaaggtgcgtatagtaacttgcgtatcaatgaagtgttgtcagaaaatgaattaaatgcaatggataaggctttatttacagaaattgtctacggaaccgttaaaagaaaatatacgttagatttttatttaaagccttttgtgaaaacaaagattaaggcatgggttaggcaattattatggatgagtatttatcaatatgtttatttagataaagttccaaatcatgccattattaatgaagcagttgaaatagcaaaagaacgcggtggctatcataatggtaatgtcgtaaatggtattttacgtacaatgatgcgtagtgacttacctgattttaatgaaattgcagatcctaaaaaaagaatggcaatcgagtatagtatgccgaagtggattatagatcattgggcaacacattatggtctcgaagaaactgaaacaattttacagtcatttttagaaacgacatcaacaactgtgcgtgccaacctgacgcgagcatcattagatgatattattgaaaagttgcaagacgaaggttatgacgttgaaaaagatcatgacttaccttattgtctccatataggaggacaaccaattattcattctcgttcatttaaagatggattcgtttcaattcaagataaaagctcaatgtttgttgcacacattatgaatgtagaccgacatgatcacgtattagatgcatgtagtgcacctggcggtaaagcttgtcacattgctgaagttttaatgccagaagggcaagttgacgcttcagatatacatgatcacaaaatagacttaattaattttaatataaaaaaattacgattaacaaatattaaagcttttcaacatgatgcgacaaaaccttatgataaaacatacgataagatacttgttgatgcaccatgtagcggattaggtgtaatgagacataagccggagattaagtatactcaaagcaaacaacatattgagtcactagttgaattacagcttgaaatattggaaaatgtaaaaaacaatgtaaaaataggtggcgaaatcatctattcaacatgtacaattgagcaactagaaaatgaaaacgtgatttatacgtttttgaaaaataataaaaacttcgaatttgaaccgtttcaacatccgataactggagagttggtcaaaacgttacaaatcatgccgcaagactttaattcagatggattctttatcactaagataaaaagaaaggacaattaggaatgataactgctgaaaagaaaaagaagaataaatttcttccaaattttgacaagcaatcaatatattcattgcgatttgacgaaatgcaaaactggctcgttgaacaagggcaacaaaaatttcgagcgaaacagatttttgaatggttatatcaaaaaagagtagattcgattgatgaaatgacgaacttatcgaaagacttacgacagcttttaaaagataactttactgttacaactttaacaactgtagtaaaacaagaaagtaaagacggtacaattaaattcttatttgaattacaagatggctatacaattgaaactgttttaatgagacatgattatggaaattcagtatgtgtaacgacacaagtaggttgtcgcatcggatgtacgttttgtgcttctacacttggcggcttaaaaagaaaccttgaagctggcgaaattgtttcacaagttttaacagttcaaaaagcccttgatgctacagaagagcgcgtatctcaaattgtcataatgggtatcggtgaaccatttgaaaattatgatgaaatgatggactttttaagaatcgtcaatgatgataacagtttaaatattggtgcacgtcacattacagtatcaacatcaggtatcattcctagaatatatgactttgcggatgaagatattcaaattaattttgctgtaagcttacacgccgcaaaagatgaagtgcgatcacgcttgatgccaattaaccgtgcatataatgttgagaagttaatcgaagcaattcaatattatcaagaaaaaacaaatcgtcgtgttacttttgaatatggtctgtttggtggtgtgaatgaccaactagaacatgcaagagaattagcacatttaataaaaggcttaaactgccatgttaacttaattcctgtcaaccatgttccagaaagaaattatgtgaaaacggctaaaaatgatatctttaaatttgaaaaagaattaaagagactaggaattaatgccacaatacgtcgtgaacaaggttcggatattgacgcagcttgtggtcaattaagagcaaaggaacgacaagtagaaacgaggtaaagacaaatgctagaggcacaattttttactgatactggacaacatagagataagaatgaagatgcgggtggtattttttataatcaaactaatcaacaacttttagttctgtgtgatggtatgggtggccataaagcaggagaagttgcaagtaaatttgttacagatgagttgaaatcccgttttgaagcggaaaatcttatagaacaacatcaagctgaaaattggttgcgtaataatataaaagatataaattttcagttatatcactatgcacaagaaaatgcagaatataaaggtatgggtacaacatgtgtttgtgcacttgtttttgaaaaatcagttgtgatagcaaatgtcggtgattctagagcctatgttattaatagtcgacaaattgaacaaattactagtgatcactcatttgttaatcatcttgttttaacgggtcaaattacgccggaagaagcatttacacatccacaacgtaatattattacgaaggtgatgggcacagataaacgtgtgagtccagatttgtttattaagcgattaaatttttatgattatttattattaaattcagatggattaactgattatgttaaagacaatgaaattaagcgtttgttagtaaaagaaggtacaatagaagatcatggtgatcaattaatgcaattggcattagataaccattcgaaagataacgttactttcatactcgcggctattgaaggtgataaagtatgataggtaaaataataaatgaacgatataaaattgtagataagcttggcggcggtggcatgagtaccgtttatcttgctgaagatacgatacttaacattaaagttgcaattaaggcgatttttataccacctagagaaaaagaagaaacattaaaacgttttgaacgagaagtacataactcatcacagctatcacatcaaaatatagtaagtatgatcgatgttgatgaagaagatgactgttactacttagtaatggaatatatcgaaggtccgactttgtctgagtatattgaaagtcatgggccattaagtgttgacacagcgattaattttacgaatcaaatattggatggcattaaacatgcgcatgatatgcgtattgtacatagagatattaagccacaaaatatattaattgacagcaataaaacgttgaaaatatttgattttggaattgctaaagctttaagtgagacgtctttaactcagactaatcatgtgttaggtactgtgcagtacttttcgccagaacaagcaaaaggtgaggcaacggatgaatgtacagatatttattctataggtattgtgttatatgaaatgcttgttggtgaaccaccctttaatggagaaactgcagttagcattgcgattaaacatattcaggattctgtgccaaatgtgacaacagatgtacgtaaggatattccgcaatctttaagtaatgtcattttacgcgctacagaaaaagacaaagcgaatcgttacaaaacaattcaagaaatgaaagatgatttgagtagtgttttacatgaaaatcgagcgaatgaagatgtctatgaactcgataaaatgaaaacgatagcggtacctttgaaaaaagaagatctagcaaagcatattagtgaacataagtcgaatcaacctaaacgtgaaacgacgcaagtacctattgtaaatgggcctgctcatcatcagcaattccaaaagccagaaggtacggtgtacgaaccaaaacctaaaaagaaatcaacacgaaagattgtgctcttatcactaatcttttcgttgttaatgattgcacttgtttcttttgtggcaatggcaatgtttggtaataaatacgaagagacacctgatgtaatcgggaaatctgtaaaagaagcagagcaaatattcaataaaaacaacctgaaattgggtaaaatttctagaagttatagtgataaatatcctgaaaatgaaattattaagacaactcctaatactggtgaacgtgttgaacgtggtgacagtgttgatgttgttatatcaaagggccctgaaaaggttaaaatgccaaatgtcattggtttacctaaggaggaagccttgcagaaattaaaatcgttaggtcttaaagatgttacgattgaaaaagtatataataatcaagcgccaaaaggatacattgcaaatcaaagtgtaaccgcaaatactgaaatcgctattcatgattctaatattaaactatatgaatctttaggcattaagcaagtttatgtagaagactttgaacataaatcctttagcaaagctaaaaaagccttagaagaaaaagggtttaaagttgaaagtaaggaagagtatagtgacgatattgatgagggtgatgtgatttctcaatctcctaaaggaaaatcagtagatgaggggtcaacgatttcatttgttgtttctaaaggtaaaaaaagtgactcatcagatgtcaaaacgacaactgaatcggtagatgtaccatacactggtaaaaatgataagtcacaaaaagttaaagtttatattaaagataaagataatgacggttcaactgaaaaaggtagtttcgatattactagtgatcaacgtatagacattcctttaagaattgaaaaaggaaaaacagcaagttatattgttaaagttgacggtaaaactgtagctgaaaaagaagtcagctatgatgatgtataaatataattgaagtaaatgtaccgaggtttctatttggaagtctcggtatttttatgttgagattgcggtagttttaaaatgcttcatgtcatcatatacaggtgagcattgtctatcaattctgtatcactctcacaatatttatatcatttgaaatgatcatttatatattaattttccagtctttgatataataaatgcagtaaaattaatcgagaggtgccattttgaagacaggtcgaatagtgaaatcaattagtggggtatatcaagtagacgttaatggcgaacgtttcaatacaaaaccacgaggattatttagaaagaaaaaattttcaccggtagttggtgatatagtggaatttgaagttcaaaacattaacgaaggttatattcatcaagtgtttgagcgggaaaatgagttgaaaagaccacctgtaagtaatatagatacactagtaattgtaatgagtgctgtcgagccaaatttttcaacgcaattattagatcgatttttagttattgcacattcgtatcagttaaatgcgagaattttggtgactaaaaaagataaaacaccaattgaaaagcagttcgaaataaatgagttgttgaaaatatatgaaaatattggctatgagactgaatttattggaaatgatgatgatcgaaaaaaaattgtagaagcttggccagctggacttatagtacttagtggtcaatcaggtgtcggtaagtccactttcttaaatcattatcgtccagaacttaatcttgagacaaatgatatatcaaaatcattaaatcgaggaaagcatactacaagacatgtcgaactattcgaacgtcaaaacggttatattgcagacacacctggattcagtgctttagattttgatcatatagataaagatgaaataaaagattattttcttgaattaaatcgatatggtgaaacatgtaagtttaggaattgtaatcatatcaaagaacctaattgtaatgttaagcatcaattagagatagggaatattgcgcaatttagatacgaccattatttacaactatttaatgaaatttcaaatagaaaggttagatattaaatgacaaaactatatccatcattattatctgttgattttttggatttacaacatgaattaaaacgacttgaagaagcaggcgtcgacggagttcattttgatgttatggatggtcaatttgtgcctaatatatctattggtttaccaatattagatgcagtaagaaaaggcacaacattacctatagacgtacatttgatgattgaaaatccagaaaagtatattgcatcatttgcagaacatggtgccgatatgatttcaattcatgtcgaatcaacgcctcatattcatcgtgctattcaaatgattaaacatttagataaaaaagctggtgtagtaattaatcctggtacaccaatatcacaaattgaacctattttagacattgttgattatgtactagtgatgacagttaacccagggtttggtggtcaatcatttattgatcaatgcgtagaaaaaatagcgggtcttaatgctattaaaatggaacgtcaattaaactttgatattgaagttgatggaggcgtaaataccgatacagcgaaagtttgtgttgaaaatggtgctacaatgctagtaacaggttcatttttctttaaacaagaggattataaaaaagtcacacaagcattgaaaggttgagtgtatatgcatataaatttattatgttctgatcgacacttgccgcaagatatttgggccaaaagtaatgaaggtaaatggggcggcgttgatagaggtgctttgattttattgaagcatcaaattatcccttttttctcagtgggagactttgattcagtcagtaaagaagaacgccaacttctaacagaacagttacaaatcaaaccagttcaagctgaaaaagctgatacggatttagctttagcggttgataaagctgttgcacttggatttgatagtattacaatttatggtgcaacaggcggacgattagatcacttttttggggcaattcagttattattgaaaaaagcatattataaacatgatgttcatatagaagttatcgatcaacaaaataaaattgaattattgcctaaaggtcaacatacagttgaaaaagataagagttatccgtacatttcatttataccgatgactgatgatgtagaactttctctagcaggttttaaatataatttagctagacaaatgcttaatataggttctactttaactatttcaaatgaaattgagtctttgcaagcgaaagtaactgtacatgatgggttgattttgcaaattagaagtacagatttaaattaagtatattcaaatttgtgaggatttttaataaagtgcatgagttatttaataaagtgacgtttatagatagaatttataacataataatagatgaatcacgctgtaattaatgaagattatggcgtgatttattattgaaaggaaaattgtaggtcctagtacattgatttatgtgccaaaatcgatattgaacccataagtccaatttgacagagaaccattattaaacgtattaaccaaattatattgatagttcgaatttcactatgaaccattatgtattgtttggtaacaaaaaaagaactaagaggttgagctcttagttcttaagtaaatgtgtcctccacataaggtcacattttttatgtgcaatatatttattaaactctagttactttaccagattttaaagcacgtgcagaaacccaaacttttttaggtttaccgtcaactaggattctaactttttgaaggttagcgttccatctacgtttagtagagtttaaagcgtgtgaacgtctgttaccagtcgaagctttacgacctgttacgaaacattgtttacccatatgagtacctcctttaataaatataaatacacataactacttatatacttaattaagatagcatagtttcatttgaaaaacaatgaataattttcacataaaagtcaaaaatactgagttttgtgatataattgtagactgtgaagttatgtagtatgatattttagagaaataagtgaatgaaacatttaaaatttttatttaatgatactacatctattaaaagaaaacgcctatagataatcgtcatgagtgtaaattcagtttactcaaaatataataggtgatttaagcgtaagtcattctgataagttgtaccattgatattttataaaaataatcaatgaaacttaaagcgtttatgactacactaagtggtaaaattttaaaagtgattagggaaaacgaataataaactttgaaatttaggagggacaaagatatgacattagagatttcaaatgattacggtaaaattgatatttcaaacgaagtgattgcttcggttgtaggtggaaaggccgttgaatgttatggtattgtaggtatggcatctagacaacaagttagagatggtattgcggaaatactaggacatgaaaattatgctaaaggcatcaaagtaactgaaaataatggcgtagtggatatagatatgtacattattgtaagttacggtgtgaaaatatctgaagttgccaataatgtacaatcaacagtgaaatatactttggaaaaatcacttaatgtatcagtaaattcaatcaatatatatgtacaaggtgtacgtgtgaataatacaggcaagaaagcttaggaggacaacttgaaatgattagcaaaattaatggtaaattatttgccgatatgattatacaaggggcacaaaatttatctaacaatgcagatttggtagattctttgaatgtgtatccagtgccagatggtgatacaggaacaaatatgaatcttactatgacttcaggtcgcgaagaagtagagaataatttgtcgaaaaatatcggcgaattaggtaaaacattctcgaaaggtttactaatgggtgcaagaggtaactctggtgtcatcttgtcacaattattcagaggattttgtaaaaatattgaaagtgaatctgaaattaattcaaaattgttagctgaaagttttcaagctggtgttgaaacggcatataaagctgttatgaaaccagttgaaggtacaatacttacagttgcaaaagatgctgcgcaagctgcaatagaaaaagcaaataatactgaagattgtatagaattaatggagtacattattgtaaaagccaatgaatcacttgaaaacacaccaaacttattagctgtacttaaagaagttggtgttgttgatagtggcggtaaaggtttgttatgcgtttacgaaggattcttaaaagcgcttaaaggtgaaaaagttgaagccaaagttgcaaagatagataaagatgaatttgtacatgatgaacatgatttccatggtgtaattaatactgaagatattatttatggctattgtactgaaatgatggttcgttttggaaagaataaaaaagcctttgatgaacaagaattcaggcaagatatgagtcaatttggtgattctttattagtcattaatgatgaagaaattgtgaaagttcacgtgcataccgaatacccaggtaaagtgtttaattatggtcaacaatatggtgaattaattaaacttaaggttgaaaatatgagagaacagcaccgtgaagtgattcgaaaagaacagcacacagctaaaccgaaaatggaaacggttgaaacagcaattattactatttctatgggtgaaggtatttcagagatatttaaatcaatgggtgccacacatatcattagtggtggacaaacgatgaatccttctacagaagatatcgttaaagtcattgaacaatcaaaatgtaaacgtgcaattattttaccgaataataaaaatatcttaatggcaagtgaacaagcagcgagtattgttgatgcagaagctgttgttattccaacgaaatctattcctcaaggtataagcgcactattccaatatgatgtggacgcaacacttgaagaaaataaagcgcaaatggctgattcagtaaataacgttaaatctggttcattaacgtacgctgttcgtgatacgaaaattgatggcgttgagattaaaaaagacgcgtttatgggcttgattgaagataagattgtaagcagccaaagtgatcaattaacaacggttactgagttgttaaatgagatgttagcagaagatagtgaaatattgactgtgattattggtcaagatgcagagcaagcagttacagataacatgataaactggatcgaagagcaatatccagatgtagaagtggaagttcatgaaggtggacaaccaatttatcaatatttcttttcagtagaataaaaatttaaaataaaaaactaccaatgataaatcatcagttggtagttttttattttgctattttagtgatattgcgggttaaaagtatcgttctcgagttgctaacaatgtcatgttcaacttagtcatgataaaataaataacatactaaatgatacgtaaaatcaaataaaacataggtgatttattttggctaaagtaaacttaatagaaagtccatattctcttttacaattaaaaggtataggtcctaagaaaatagaagtattgcaacaactaaatattcatacagtggaagatcttgttctttatttgccaactagatatgaagataatacagtgattgatttgaatcaagcagaagatcaatctaacgttacgatagaaggacaagtatatacagctccagtagttgcattttttggaagaaataaatcaaaattaaccgttcatttaatggtaaataatattgctgtcaaatgtatttttttcaatcaaccgtatttaaaaaagaaaatcgaattaaatcaaactataactgttaaaggtaagtggaatagggttaaacaggaaattactggtaatagggttttctttaattcacaagggacacaaactcaagaaaacgcagatgttcaattagaaccagtctatcgtattaaggaaggtattaaacaaaagcaaatacgagaccaaattagacaagcgttaaatgatgtgacaattcatgaatggttaactgatgaactaagagaaaaatataaattagagaccttggactttactttgaacacattacatcatcctaaaagtaaagaggatttattacgtgctcgtagaacctatgcatttactgaactgtttttattcgaattacgtatgcaatggctaaatagattagaaaagtcatctgacgaagcaattgaaattgattatgacatagaccaagttaaatcatttattgatcgtttaccttttgaactaactgaagcacagaaatccagtgttaatgaaatttttagagatttaaaagcaccaatacgtatgcatcgattacttcaaggtgatgtaggttcaggaaaaacagtagttgctgcaatttgtatgtatgcgttaaaaactgctggttatcaatcagcattgatggtaccaactgaaattttagcagagcaacatgctgaaagtttaatggctttatttggagattctatgaacgttgcattgttaactgggtcagtaaaaggtaagaaacgaaagatacttttagaacaacttgaaaatggtacgattgattgtttaattggaacccatgctttgattcaagatgatgtgattttccataatgttggtttagtaattacagatgaacaacatcgatttggtgtgaatcaacgccagcttttaagagaaaaaggtgcaatgacgaatgtgttatttatgacagcaacgccgataccaagaacactagcaatatcagtttttggtgagatggatgtgtcttcaattaaacaattaccaaaaggtcgtaaacctatcattactacttgggcaaagcatgagcaatacgataaagttttgatgcaaatgacctcagagttgaaaaaaggtcgtcaagcatatgtcatttgcccgctaatagaaagttctgagcatctcgaagatgttcaaaatgttgtcgcattgtacgagtctttacaacagtattatggtgtttcccgtgtagggttattgcatggtaagttatctgccgatgaaaaagatgaggtcatgcaaaagtttagtaatcatgagataaatgttttagtttctactactgttgttgaagtaggtgttaatgtaccgaatgcaacttttatgatgatttatgatgcggatcgctttggattatcaactttacatcagttacgcggtcgtgtaggtagaagtgaccagcaaagttactgtgttttaattgcatcccctaaaacagaaacaggaattgaaagaatgacaattatgacacaaacaacggatggatttgaattgagtgaacgagacttagaaatgcgtggtcctggagatttctttggtgttaaacaaagtggattgccagatttcttagttgccaatttagttgaaggttatcgtatgttagaagttgctcgtgatgaagcagctgaacttattcaatctggcgtattctttgaaaatacgtatcaacatttacgtcattttgttgaagaaaatttattacatcgtagttttgactaattgccatgctgatttgtcaatttgagtgcaacacttcgttaattgagtgatatgacacttgaactatttaaatgtaaagtggtattttaacaatttataaattttcgactaaataatagctaaatattacagttatttgttgagtcggttaaatagaaagtgttatgatatgtgaggaatgtttaagactaggtactaaaaaatgaggggtgagacgttgaaactaaagaaagataaacgtagagaagcaatcagacaacaaattgatagcaatcccttcatcacagaccatgaactaagcgacttatttcaagtgagtatacaaacaattcgtttagatcgcacttatttaaacataccagaattaaggaagcgtattaaattagttgctgaaaagaattatgaccaaataagttctattgaagaacaagaatttattggtgatttgattcaagtcaatccaaatgttaaagcgcaatcaattttagatattacatcggattctgtttttcataaaactggaattgcgcgtggtcatgtgctgtttgctcaggcaaattcgttatgtgttgcgctaattaagcaaccaacagttttaactcatgagagtagcattcaatttattgaaaaagtaaaattaaatgatacggtaagagcagaagcacgagttgtaaatcaaactgcaaaacattattacgtcgaagtaaagtcatatgttaaacatacattagttttcaaaggaaattttaaaatgttttatgataagcgaggataaaattatggttaaattagcaattgatatgatgggtggcgacaatgcgcctgatatcgtattagaagccgtacaaaaggctgttgaagactttaaagatctagaaattatacttttcggtgacgaaaaaaagtataatctgaaccatgaacgaatcgaatttagacattgttctgaaaagattgaaatggaagatgagcctgttagagcgattaaacgtaaaaaagatagctcaatggtaaaaatggctgaagctgtgaaatctggtgaagcagatggatgtgtgtcagcaggtaatactggtgctttaatgtcagctggtttattcattgttggacgtattaaaggtgtagctagaccggctttagtagtaacattgccaacgattgatggaaaaggttttgtctttttagacgttggtgcaaatgctgatgctaaacctgaacacttattacagtatgcgcaactaggggatatttatgctcaaaaaattagaggtattgataatccgaaaatctcattattaaatataggaaccgagccagctaaaggtaatagtttaacgaaaaaatcatatgagttattaaatcatgatcattcattgaattttgttgggaatattgaagcgaagacattaatggatggcgatacagatgttgtagttaccgatggctatactgggaacatggtccttaaaaatttagaaggtactgcaaaatcaatcggtaaaatgttaaaagatacgattatgagtagtactaaaaataaattagcaggtgcaatattgaagaaagatttagctgaattcgctaaaaagatggattactcagaatacggtggttccgtattattaggattggaaggtactgtagttaaagcacacggtagttcaaatgctaaagctttttattctgcaattagacaagcgaaaatcgcaggagaacaaaatattgtacaaacaatgaaagagactgtaggtgaatcaaatgagtaaaacagcaattatttttccgggacaaggtgcccaaaaagttggtatggcgcaagatttgtttaacaacaatgatcaagcaactgaaattttaacttcagcagcgaacacattagactttgatattttagagacaatgtttactgatgaagaaggtaaattgggtgaaactgaaaacacacaaccagctttattgacgcatagttcggcattattagcagcgctaaaaaatttgaatcctgattttactatggggcatagtttaggtgaatattcaagtttagttgcagctgacgtattatcatttgaagatgcagttaaaattgttagaaaacgtggtcaattaatggcgcaagcatttcctactggtgtaggaagcatggctgcagtattgggattagattttgataaagtcgatgaaatttgtaagtcattatcatctgatgacaaaataattgaaccagcaaacattaattgcccaggtcaaattgttgtttcaggtcacaaagctttaattgatgagctagtagaaaaaggtaaatcattaggtgcaaaacgtgtcatgcctttagcagtatctggaccattccattcatcgctaatgaaagtgattgaagaagatttttcaagttacattaatcaatttgaatggcgtgatgctaagtttcctgtagttcaaaatgtaaatgcgcaaggtgaaactgacaaagaagtaattaaatctaatatggtcaagcaattatattcaccagtacaattcattaactcaacagaatggctaatagaccaaggtgttgatcattttattgaaattggtcctggaaaagttttatctggcttaattaaaaaaataaatagagatgttaagttaacatcaattcaaactttagaagatgtgaaaggatggaatgaaaatgactaagagtgctttagtaacaggtgcatcaagaggaattggacgtagtattgcgttacaattagcagaagaaggatataatgtagcagtaaactatgcaggcagcaaagagaaagctgaagcagtagtcgaagaaatcaaagctaaaggtgttgacagttttgcgattcaagcaaatgttgccgatgctgatgaagttaaagcaatgattaaagaagtagttagccaatttggttctttagatgttttagtaaataatgcaggtattactcgcgataatttattaatgcgtatgaaagaacaagagtgggatgatgttattgacacaaacttaaaaggtgtatttaactgtatccaaaaagcaacaccacaaatgttaagacaacgtagtggtgctatcatcaatttatcaagtgttgttggagcagtaggtaatccgggacaagcaaactatgttgcaacaaaagcaggtgttattggtttaactaaatctgcggcgcgtgaattagcatctcgtggtatcactgtaaatgcagttgcacctggttttattgtttctgatatgacagatgctttaagtgatgagcttaaagaacaaatgttgactcaaattccgttagcacgttttggtcaagacacagatattgctaatacagtagcgttcttagcatcagacaaagcaaaatatattacaggtcaaacaatccatgtaaatggtggaatgtacatgtaatatatttgagctaaagctcattgacgcagtggttgactggtcatccaatggagaattgtctgacctagtcaactttgcgggggaaattctaagcaacctagataaggttccagaatttctccctaagaaacactaatcaataaattgataagtgtttctaaaatttctacttgttttttagaatttaaaatgggaaaatatagtagtctatgtataggcatttttaaaggaggtgaatcgacgtggaaaatttcgataaagtaaaagatatcatcgttgaccgtttaggtgtagacgctgataaagtaactgaagatgcatctttcaaagatgatttaggcgctgactcacttgatatcgctgaattagtaatggaattagaagacgagtttggtactgaaattcctgatgaagaagctgaaaaaatcaacactgttggtgatgctgttaaatttattaacagtcttgaaaaataataaatcttacatctgggtcgtcagtattgtcgactcagtttttttctttaattatcaatagttttaacgtaaaattaaagatgattcaagagcaacacataaaggagataaaataatgtctaaacaaaagaaaagtgagatagttaatcgttttagaaagcgctttgatactaaaatgacagagttaggctttacttatcaaaatattgatttataccaacaagcattttcgcattcgagttttattaatgattttaatatgaatcgtttagaccataatgagcgtttagagtttttgggtgatgcggtattagaattgacggtttcacgatatttatttgataaacatcccaacttgccagaagggaatttaacaaaaatgcgtgccactattgtatgtgagccctcacttgtaatatttgcgaataaaattggattgaacgaaatgattttacttggtaaaggtgaagagaaaacagggggacgtacaagaccatcattaatatcagatgcattcgaagcatttattggggcattgtatttggatcaaggactagatatagtttggaaatttgctgagaaagtcattttcccacatgtagaacaaaatgagttattaggcgtggtagattttaaaacacaattccaagaatatgtgcaccagcaaaataaaggtgatgtaacctataatttaataaaagaagagggaccggcacatcatcgtctattcacttcagaagttattctgcaaggggaagcaatagctgaaggtaaagggaaaacgaaaaaagaatcagaacaacgtgctgctgaaagtgcctataagcaattaaaacaaattaaatagaaatttatatgatacgacatataggtgttcgatttaggatttaaggaagaatttttaatattttatggaacaacttcgaaatttaatatacaaatactaaaatatcgtatacatgtgttctttaaaattgtgataaggagtttaggatggtttatttaaaatcaatagatgccattggatttaagtcttttgcagatcaaaccaatgttcaattcgataaaggtgtaactgcaattgttggtccaaatggaagcggtaaaagtaatattacagatgctattaaatgggtgttgggtgaacaatcggctaaatcattacgtggctcaaaaatggaagatattatcttctcaggtgcagaacatcgcaaagctcaaaattatgctgaagtacagttaagattagataatcattctaaaaagctcagtgttgatgaaaacgaagttattgtaacaagaagattgtatcgaagtggtgaaagtgagtactacataaataatgaccgtgcaagattaaaagatattgccgatttatttttagattctggattgggaaaagaagcgtatagcattatctcgcaaggtagagttgatgaaatactaaatgctaaaccaattgatagacgtcaaattattgaagaatcggctggtgtacttaaatataaaaaacgtaaggctgaatcattaaataaacttgaccaaacagaagataatttaacgagagtagaagacattttatatgatttggaaggtcgcgtagaacctctaaaagaggaggcagctatagctaaagaatataagacactttcacatcaaatgaaacatagtgacattgtagttacagtgcacgatattgatcaatatacaaatgacaatagacaattagatcaacgtttaaatgatttacaaggccaacaagcaaataaagaagctgacaagcaacgtttaagccaacaaattcaacaatataaaggtaaacgtcatcaacttgataatgatgttgaatcgcttaattatcaattagtaaaagctacggaagcctttgaaaaatatacgggacaattaaatgttttggaagaacgtaagaaaaatcaatctgaaacaaatgcacgatatgaagaagaacaagaaaatttaatggagcttttagaaaatatatcaaatgagatttctgaagctcaagatacttataagtctctgaaaagtaaacaaaaagaactcaatgctgtcattcgtgaacttgaagaacaactatatgtttcagacgaagcacatgatgaaaaattggaagaaattaaaaacgaatactatacattaatgtcagagcaatcagatgttaacaatgatattcgttttttaaagcatactatagaagagaatgaggctaaaaaatcaagactagattctcgattagttgaagtttttgagcaattgaaagatattcagggtcaaataaaaacgacaaaaaaagaatatcaacagaccaacaaagaactttctgctgtagataaagaaattaaaaatatagaaaaagacctcactgatacaaaaaaagcacaaaatgaatacgaagagaaattgtatcaagcatatcgatataccgaaaaaatgaaaacacgtattgatagtttggcaacgcaagaggaagaatatacttattttttcaatggcgtcaaacatattttgaaagctaaaaataaagaattaaagggtatttatggtgcagttgcggaaattattgatgtgccatctaaattaactcaggcaattgaaacagcattaggtgcttcattacaacatgtcattgtagattcagaaaaagatggacgccaggctattcaatttttaaaagaacgtaatttaggtcgtgcgacgtttttaccattaaatgttatacagagtagagtggtagcgactgatattaaatctattgctaaagaggcaaacggatttattagtatcgcttcggaagcagttaaagtagcaccagaatatcaaaatattatcgggaatttattaggtaatacgattatcgttgatcatttaaagcatgcaaatgaattggcacgtgcgattaaatatcgaactcgtattgttactttggaaggtgatattgtaaatcctggtggttctatgactggtggtggcgctcgtaagtcaaaaagtattctgtctcaaaaagacgagttgacaacaatgagacaccaattagaagattacttgcgtcaaacagaatcatttgaacaacaatttaaagagttgaagataaaaagtgatcaattaagtgaactgtattttgaaaaaagtcaaaagcataatacacttaaagagcaagtgcatcattttgaaatggagctcgatagattaactacacaagaaacacaaataaaaaatgatcatgaagaattcgaatttgaaaaaaatgatggttatacgagtgacaaaagtcgacaaactttgagtgaaaaagaaacttatctagaaagtattaaagcatctttaaaacgactagaagatgaaattgaacgctacacaaaactttctaaagaaggtaaggaaagcgttactaaaacacaacaaaccttacatcagaaacaatctgatcttgctgtggttaaagagcgtattaaaacacaacaacagacaatagatcgattaaataatcaaaatcaacaaactaaacatcaattaaaagatgttaaagaaaaaattgcattctttaattcggatgaagtgatgggcgaacaagcttttcaaaatattaaagatcaaattaatggtcaacaagaaacgagaacacgcttatcagatgaattagataaattgaaacaacaacgtattgagttgaatgaacaaatcgatgcgcaagaagctaaactacaagtttgtcaccaagatattttagctatcgaaaatcactaccaagatattaaagctgaacaatcaaagctagatgtattaattcatcatgcgatagatcatttaaatgatgaatatcaattgactgttgaacgtgcgaaatctgaatatacgagtgatgaatcgattgacgcattacgtaaaaaagttaagttaatgaagatgtcgattgatgaactaggtcctgtaaacttaaatgcaattgaacaatttgaagagttaaatgaacgttatacatttttaagtgaacaacgtacagatcttcgtaaagctaaagaaacattagagcaaattataagtgaaatggatcaagaggttactgaaagatttaaagaaactttccatgctattcaaggacattttacagctgtgttcaaacaattgtttggtggaggcgatgcagaattgcaattaactgaagccgattatttaacagctggtattgatattgtggtacaaccaccgggtaaaaagttgcaacatttatcgttactgagtggtggtgagcgtgcattaactgctattgctttactatttgcaattttaaaagtaagatctgcaccttttgttatattagatgaggttgaagctgcactagatgaagcaaatgttattagatacgcaaaatatttaaatgagttatcagacgaaacacaattcattgttattacacaccgtaaaggaacaatggaatttgcagataggttatacggtgtaacaatgcaagaatcaggtgttactaaacttgtgagtgtgaatttaaatacaatagatgatgtgttgaaggaggagcaataatgagcttttttaaacgcttaaaagataagtttgcaacaaataaagaaaatgaagaagttaaatccttaacagaagaacaaggtcaagacaaattagaagatacacattctgaaggttcaacgcaggacgcaaatgatttagcagaaaatgctgaagtgaaaaagaagccacgcaagttgagtgaagcggattttgatgacgatggcttaatatcaattgaagattttgaagaaattgaagctcaaaaaatgggtgctaaatttaaagcaggactcgaaaaatctcgtcaaaatttccaagaacaattaaataatttgatagcgagatatcgtaaagtagatgaagacttttttgaagctttagaagaaatgttaatcactgcagacgtcggttttaatacagtgatgacgttaactgaagaattacgtatggaagcacaacgacgtaatattcaagatactgaagatttgcgtgaagtcattgttgaaaaaatcgtagagatttaccatcaagaagatgataattcagaagctatgaacttagaagatggtcgtttaaatgtcattttaatggttggtgtgaatggtgttggtaaaacaacaacaattggaaaattagcttaccgatataaaatggaaggtaaaaaagtaatgttagctgcgggcgatacttttagagcgggtgctattgatcaattgaaagtttggggcgaacgtgttggtgtagacgtaattagccaaagtgaaggttctgatccagctgctgttatgtatgatgcgattaatgccgctaaaaacaaaggtgttgatattttaatctgtgataccgctggacgtttacaaaataaaacaaatctaatgcaagaattagaaaaagttaagcgtgtaattaatcgagcagtgccagatgcgcctcatgaagcattactatgtttagatgctacaactggtcagaatgcgttgtcacaagctagaaactttaaagaagtaacaaatgttacaggtattgtattaacgaaattagatggtacagccaaaggtggtatcgtattagccattcgtaatgaattgcacatcccagttaaatatgtaggtttaggtgagcaattagatgacttacaaccatttaaccctgaaagttatgtctacggcttattcgctgatatgattgaacaaaatgaagaaataacaacagttgaaaatgatcaaattgtaacagaagaaaaggacgataatcatgggtcaaaatgatttagttaaaacgttacgaatgaattatttgtttgatttttatcaatccttattgacgaataaacaacgtaattatttggaattattttatcttgaagattattctttaagtgaaatcgcagatacttttaatgtgagtagacaagcagtttatgataatataagaagaactggcgatttagttgaagattatgaaaagaaattggaattataccagaaatttgagcaacgccgagaaatatatgatgaaatgaaacaacatttaagtaatccagaacaaatacaacgttatattcaacaattagaagacttagaatagatataaattgagggaggacatcgatatggcatttgaagggttatcagaacgcttgcaagcgacgatgcaaaaaatgcgtggtaagggtaaacttactgaagctgatataaagataatgatgcgtgaagtaagattagcgttacttgaggctgacgtaaactttaaagtggtaaaagaatttattaaaacagtatcagaacgcgcattaggttccgatgtaatgcaatcattaacaccagggcaacaagttattaaaatagttcaagatgaattaacgcagttgatgggtggagaaaatacgtcgattaatatgtcaaataaaccacctactgttgttatgatggttggtttacaaggtgctggtaaaacaacaactgcaggtaaattagcattattgatgcgtaaaaaatacaacaaaaaacctatgttagttgcagcagatatttatcgtccagcagcgataaatcaattacaaacagtagggaaacaaattgatattcctgtatacagtgaaggagatcaagtaaagccacaacaaattgtaactaatgcattaaaacatgctaaagaagaacatttagactttgtaatcattgatacagcaggtcgattacacatcgatgaagcattgatgaacgaattaaaagaagtaaaagacattgctaaaccaaacgaaattatgttagttgtcgattcaatgacgggtcaagatgctgtcaatgttgcagaatcttttgacgatcaacttgatgtcacaggtgttaccttaactaaattagatggtgatacacgtggtggtgcagctttatctattcgttcggtgacacaaaaaccaattaaatttgttggtatgagtgaaaagttagatggtttagagctattccatcctgaacgtatggcatcacgtattttaggtatgggtgatgtgttaagtttaattgaaaaagcgcaacaagatgtggatcaagaaaaagcaaaagatttagagaaaaagatgcgtgagtcatcgtttactttagatgattttttagaacaacttgatcaggtgaaaaatctaggaccactggatgatattatgaaaatgattccaggtatgaataaaatgaaagggctagataagcttaatatgagtgaaaagcaaattgatcatattaaagcgattatccagtcaatgacgccggctgaaagaaacaatccagacacattgaatgtatcacgtaaaaagcgtattgctaaagggtctggtcgttcattacaagaagtcaatcgtttgatgaaacaatttaacgatatgaagaaaatgatgaaacagttcactggtggcggtaaaggtaaaaaaggtaaacgcaatcaaatgcaaaatatgttaaaaggtatgaatttaccgttttaatgtttaatataacacgctgatttttgttgcaatgagatgtgcatcccgaaagttatactaaagaatataactttatggggtgcatatttttagatacacaataataattaaaaactgaaattgctgatttgctagaacatgaggttattgttgctaatattaataagttatattgggggaacgtgtgcggtagaagtggtaccattcatgtccttacgagataaattaacttaacacgtaggtggtgaaatttactatgaatttttataacctattaacagtctaatttagtaatcacatagttattattgtaagaaaaaggttcaataattttcctggtaaagaaaaaactctttacaaacattcatacacctgttaatattatttcttgtagaaaataaaaattaaaacatgacttaaaggagattttataaatggcagttaaaattcgtttaacacgtttaggttcaaaaagaaatccattctatcgtatcgtagtagcagatgctcgttctccacgtgacggacgtatcatcgaacaaatcggtacttataacccaacgagcgctaatgctccagaaattaaagttgacgaagcgttagctttaaaatggttaaatgatggtgcgaaaccaactgatacagttcacaatatcttatcaaaagaaggtattatgaaaaaatttgacgaacaaaagaaagctaagtaatttagcgtaaaattgttctaacaataagaataactcgtttacactgacagttattactcaatgatacgttgggaatatcacatgttagtaatatagaacgtattgggtaccataatggtgccctttttctttgaattattttcaattaaaatagaagtgttcaaagcatagagttggaggtaatagaatgagagttgaagttggtcaaattgttaacacacatggtattaaaggtgaaattaaagtaaaatccaattcagactttacagacgttcgttttcaacccggtcaagtgctgacagttgtgcataacaataacgaccttgaatatactgttaagtcacatagagtgcataaagggcttcatatgcttacatttgaaggtattaataatattaatgatattgagcatttaaaagggagttctatttatcaagagcgtgatcatgaagatatcgtacttgaggaaaatgaattttattattcagatattataggatgtacagtttttgatgatcaagaaacaccaataggtcgtgtaattaatatatttgaaacaggtgcgaatgatgtgtgggtgattaaaggatctaaagaatatttgattccttatattgctgatgttgtaaaagaagtggatgttgaaaataaaaaaattatcatcacgccaatggaaggattgttggattaatgaaaattgattatttaactttatttcctgaaatgtttgatggtgttttaaatcattcaattatgaaacgtgcccaagaaaacaataaattacaaatcaatacggttaattttagagattatgcaattaacaagcacaaccaagtagatgattatccgtatggtggcggacaaggtatggtgttaaagcctgaacctgtttttaatgcgatggaagacttagatgtcacagaacaaacacgcgttattttaatgtgtccacaaggcgagccattttcacatcagaaagctgttgaattaagcaaggccgaccacatcgttttcatatgcggacattatgaaggttacgatgaacgtatccgaacacatcttgtcacagatgaaatatcaatgggtgactatgttttaactggtggagaattgccagcgatgaccatgactgatgctattgttagactgattccaggtgttttaggtaatgaacagtcacatcaagacgattcattttcagatgggttattagagtttccgcaatatacacgtccgcgtgaatttaagggtctaacagttccagatgttttattgtctggaaatcatgccaatattgatgcatggagacatgagcaaaagttgatccgcacatataataaaagacctgacttaattgaaaaatatccattaactaatgcagataagcaaatattagaaagatataaaataggattgaaaaaaggttagtattgtgctaacataatctgagtgtggaaacactaaaatcactatgatccgctgctatatatttgtcgaggcaagaacataggttgaagaggagaatttataatgacaaatcacaaattaatcgaagcagtaactaaatcacaattacgtacagacttaccaagtttccgtcctggtgatactttacgtgtacacgtacgtatcattgagggtactcgtgagcgtatccaagtattcgaaggcgttgtaattaaacgtcgtggcggtggcgtttctgaaacgtttacagttcgtaaaatttcatcaggtgttggcgtggaacgtacattcccattacacacaccaaaaattgaaaaaatcgaagttaaacgtcgtggtaaagtacgtcgtgctaaattatattacttacgtagtttacgtggtaaagctgctagaatccaagaaattcgttaatcagcatttaaacaaagctatgtatgagtcaaattcgactcaaacaataaagccatctaggtcacttttatggagtgatatagatggctttttttgctgtttagttaatgtaaagttgataatgtaattgtttattccttctctattcataacgtgtttgctcaaaatggttatataaacaaaaatctactaagtgccattgaaaaggacttagtagatttattaaatatatgcgtagcaacattatttttgtcttgcccatctcgtgaaaataatactacatataatgccaaatatagtaattgttataagtaaataatagtatggtggggtatagctcaattgaatctttgttatatttttaggtgctttaatgccggtcataacaccatttacttgttcaactttaagactttgatcacctgatgtcgctttcataccttgattatatgctgttggcaaaacaatatacccagatgaatttttatttttagtaatagtataaccatgctttgtcttactaactttgacagcttctaatgaatttgaagcgtctttaagcgtggtataatcttcgccgtatatcccttttaaatttactcgatacttacctttaggcaatgataatctaattctatctggagctttaatgcgtatcgttacgggtgttacaacgcgtcgatatttataagtgagtttatttctttcttgtgtatattcattcactttaacatcatgagctttatccggcgaaagtaattctaaatccatttcaaaatacaaatctttaaattgattagaaactgattttggcaactgtacagttagaccaccattattttgtttaacttgtaataaatgttttgtaggagattgccaggctgcactatttaatttaattgttgaatctgatagtaaatttttattggctttaaaatgtgtattaacatctttaatattgttagaaacaatcccttgcaacattgcttgttctttatctaatggagattttaattctttattggaaaagaccttatttgtaatatgtgcacttggataatggatggtatttttagaatgaatccaacgaactttattgtctttgtgttcagacttaattttaaatccatatggtaagttgtcatcatgattcactctaattcgatcattaacattccaaagtgatagtaaattttgacgattgccaagtaatctataagtgctgtttttatcgattggcatattaatttggagtgtcttgtcataatattttaaaatgtctccattaaaaatactagaatataatgaaatgccattataatgatatataaatggtgaatttaatgcatagtctgacatataatcaatgcgattaaatgagcctgttgcattttgatttatcttttttataagctggtttacatagttactatggtaatcatgttgtttcaacgttgataatgattgttgataaggtttgattgccatgtttttgttgttatctaaaatgacgatttgttgaatcataacgattaatactaatattgcaacggttaattttttataacgccataaactaaattttaaaataacggcaagcactattagcaggataatacctactataagtgcaagtgggtgtgtcggtgatagtaatacataaagtattgcgatgatgcatacgggtattgttctgattaaataatatttcatatttaatgttgataaatgttgaataaacaatccgcaaagagcacttgatgatagtgctaagatatacacccaacgcctttctggaaatgaaaaaccattaaaagcactgtcgaaatactgtgataatgaacctataaataatatccatgttactattgcgaaaagtctataaaagtaaaaacgatacagtttgaatgacaataatgcaacgatagtaagaattgaaatcgtaatataaaatccatcgctaaagaaaaaataatgataatcaagtggtgtcaaaaacggtatatcaacattgggattttgctttctgtcattttccaaaaacgcagaaatgccagtgaataaaccaaatacacttgataacacactcaaaactgtagcagatatgacgcaaattaatttttgtgttctagagacaatgtcatatttgtaagtgaaaatgagtcgatataaatagtagcaacctataataatagcttgataataactgaaataaaaattgctaaatagtgttaaggctatcgcaacaatgaaaataccgattttgcgttgttgaaaatatctttccaaaccaagaatcgataatggcaataaatataataaatttccataaaatgaccaagtaaaattaaagtatataacgacagttgacatgccgtataaaatcgtagcgatcatatttgctgagcgtttaaagtgtaatattttaaataagtagaaggtcacgacaaatgttatgatagctcgtatcatagccataataagttggtttgtcggccaaaaatgtattgtcgtcggattaaatataccaaccgtttctcctattttaatgaatagaaaatttagccacattaaaggtgacagcgaataataatatgatagtcctttcatataatcgccacctaatccaaacgatgcatcatataaactagaaaaactacgtagatgttcatacaaatacatttgaaatggcatcatttgacggaatccatctccagccccgctaaaaacagtaccattcacaatataatcatagatatgagtagaaaataaaataagcgttaatattacactaatgaaagttataacaaagaattgtttgacgtttgaatttagccacttttttaacacaacattatcctcaactttcaaatttaaaattaagtttaactgaaactaaagttaatgaggttcttgataggtaaagacgaagatgactgtggaacagataccttatcatagttacttaaactttggatcattttcagtttatcattaaacaaatatattgaataataaaaatgtcatactgataaagatgaatgtcacttaataagtaacttagatttaacaaatgatgatttttaattgtagaaaacttgaaataatcacttatacctaaatctaaagcattgttaagaagtgtgacaatgttaaaataaatatagttgaattaatgaatttgttctataattaacaggttatagattttaataatgagaaaagaattgacgaaagtaaggtgaattgaatggttattcaatggtatccaggacatatggcgaaagccaaaagagaagtaagtgaacaattaaaaaaagtagatgtagtgtttgaactagtagatgcaagaattccatatagttcaagaaaccctatgatagatgaagttattaaccaaaaaccacgtgttgttatattaaataaaaaagatatgtctaatttaaatgagatgtcaaaatgggaacaattttttattgataaaggatactatcctgtatcagtggatgctaagcacggtaaaaatttaaagaaagtggaagctgcagcaattaaggcgactgctgaaaaatttgaacgcgaaaaagcgaaaggacttaaacctagagcgataagagcaatgatcgttggaattccaaatgttggtaaatccacattaataaataaactggcaaagcgtagtattgcgcagactggtaataaaccaggtgtgaccaaacaacaacaatggattaaagttggtaatgcattacaactattagacacaccagggatactttggcctaaatttgaagatgaagaagtcggtaagaagttgagtttaactggtgcgataaaagatagtattgtgcacttagatgaagttgccatctatggattaaactttttaattcaaaatgatttagcgcgattaaagtcacattataatattgaagttcctgaagatgcagaaatcatagcgtggtttgatgcgatagggaaaaaacgtggcttaattcgacgtggtaatgaaattgattacgaagcagtcattgaactgattatttatgatattcgaaatgctaaaataggaaattattgttttgatatttttaaagatatgactgaggaattagcaaatgacgctaacaattaaagaagttacgcagttgattaatgcggttaatacaatagaagaattagaaaatcatgaatgctttttagatgagcgaaaaggtgttcaaaatgccatagctaggcgcagaaaagcgttagaaaaagaacaagctttaaaagaaaagtatgttgaaatgacttactttgaaaatgaaatattaaaagagcatcctaatgctattatttgtgggattgatgaagttggaagaggacctttagcaggtccagtcgttgcatgcgcaacaattttaaattcaaatcacaattatttgggccttgatgactcgaaaaaagtacctgttacgaaacgtctagaattaaatgaagcactaaaaaatgaagttactgcttttgcatatgggatcgcgacagctgaagaaatagatgaatttaatatttataaagctactcaaatcgccatgcagcgagctattgatggattatcagtacaaccaacgcatttattgatagacgcgatgacgcttgataatgcactgcctcaagtatctttaatcaagggtgatgcaagaagtgtgtccattgcagctgcaagtatcatggcaaaggtttttcgtgatgattatatgacacagttatctaaagattatcctgaatatggttttgaaaaaaacgcgggttacggtaccaaacaacatttactagcaatcgatgatattggcattatgaaagagcatagaaaaagctttgaacctataaaatcgttactgtaaatcgtaaaattcaattaaatgataaaaaagtagcatttaagtttacaatagcgcttacattttttataattgtaagggaacttaacctaagtaacaggaggatggaagatgaatatccacgagtatcaaggtaaagaaatatttcgttcaatgggcgttgcagttccagaaggacgagtagcatttactgctgaagaagcggtggagaaagcaaaagaattaaattctgatgtttatgttgtaaaagcacaaattcatgctggaggtagaggtaaagcaggcggagtaaaaattgctaaatctttatctgaggtagaaacatatgcaaaagaattattagggaaaactttggtgacacatcaaactggtccagaaggtaaagaaattaagcgtttatatatcgaagaaggttgtgctattcaaaaagaatattacgttggattcgttattgatcgtgcgactgaccaagtaacattgatggcgtctgaagaagggggcactgagattgaagaagttgctgcgaagactcctgaaaagatcttcaaagaaactatcgatccagtaatcggactttcaccattccaagcaagacgaattgcgtttaatattaatattcctaaagaatctgttaacaaagctgctaaattcttattagcactttataatgtattcattgaaaaagattgttcaatcgtagaaatcaacccattagttacaacagctgatggtgatgtattggcattagatgctaaaattaattttgatgataatgcattattcagacataaagatgttgtagaattacgtgatttagaagaagaagatccgaaagagattgaagcgtctaaacatgatttatcatacattgcattagatggtgacatcggatgtatggttaatggtgcaggtttagccatggcaacaatggatacgattaatcatttcggtggaaacccagccaatttcttagatgcaggcggaagcgctactagagaaaaagtaactgaagcatttaaaatcattttaggtgatgaaaatgttaaaggtatttttgtaaacattttcggtggcattatgaaatgtgatgttatcgcagaaggtatcgttgaagctgtaaaagaagtagatttaactttaccactagttgtacgcctagaaggtacaaatgttgagttaggtaaaaaaatcttaaaagactcaggattagcaattgaaccagcagcaacaatggctgaaggtgcacaaaaaattgttaaactagtcaaagaagcataaggaaaggatgggagcactaagatgagtgtatttatagataagaatactaaagtaatggtacaaggtattacagggtctactgcccttttccatacaaaacaaatgcttgattatggtacgaaaatagtagcaggtgtgacgcctggtaaaggtggtcaagttgttgaaggcgttcctgttttcaacactgttgaagaagctaaaaatgaaactggggcaacggtttcagtcatttacgttccagcaccatttgctgcagactcaattttagaagcagctgatgcagacttagatatggttatttgtatcactgaacatattcctgtattagacatggttaaagttaaacgctacttacaaggtagaaaaacacgtttagttggtccgaactgtccaggtgtgattacagcagatgaatgtaaaattggtattatgcctggctatattcacaaaaaaggtcatgttggtgtagtatctcgttcaggtacattaacatatgaagcagtgcaccaattgactgaagaaggtattggtcaaactacagctgttggtattggtggagacccagtcaacggaacaaactttattgatgttttaaaagcattcaatgaagatgacgaaacgaaagcagttgttatgattggtgaaatcggtggtacggctgaagaagaagcagctgaatggattaaagcgaatatgacaaaaccagttgtaggctttatcggtggacaaacagcacctcctggaaaacgtatgggacatgctggtgcaatcatttcaggtggtaaaggtactgctgaagagaaaattaaaacattaaatagttgtggtgtgaaaacagcggcaacaccttcagaaattggttcaacattaattgaagctgctaaagaagcaggtatttatgaatcattattaactgttaataaataaagttaaaagatgatataaatggctatagcccattccatactttataaaagtatcggaaatgggctatttgtcgtgcgatgaattttagtacacttttcatattttggaaagacaagttaattattttacctcctacaatagctttataaaacaaagaaaattttaattaaaatatatagcgcactatgttataatgtttgtatattattgtaaggagtgtttcatcatgaataaacaacaaagtaaagtacgctattcaattagaaaagttagtattggaattttgtcaatttcaataggtatgtttttggcattgggtatgtcgaacaaagcatatgcagatgaaattgataaatctaaagattttacaagagggtatgagcaaaatgtattcgcgaaatcagagttaaatgctaataaaaatacgacaaaagacaaaataaaaaatgaaggtgctgttaaaacatcggacacaagtttaaagttagacaacaaatcagcaatttcaaacggaaatgaaattaatcaagatataaagatttcaaatactccgaaaaactcaagccaaggtaacaatctagttattaataacaatgaacttactaaagaaattaaaattgcaaacttggaagctcaaaattctaatcagaagaaaacgaataaagttactaataattactttggttactacagttttagagaagctccaaaaacacaaatctatactgtaaaaaaaggagacacacttagtgctatagcattaaaatacaaaactacagtttcaaatattcaaaatacaaataatatagcaaatcctaatttaatatttattggtcaaaaattaaaagtgccaatgacaccattagtagaaccaaaaccaaaaacagtgtcttcaaataataaaagtaatagtaatagcagtacattaaattatttgaaaacattagagaatagaggatgggatttcgacggtagttatggatggcaatgtttcgatttagttaatgtatattggaatcatctttatggtcatggattaaaaggatatggagctaaagatataccatatgcaaataattttaatagtgaagctaaaatttatcacaacacaccaactttcaaagctgaacctggggacttagtggtttttagtggaagatttggtggaggatatggtcatacagctattgtcttaaatggtgattatgatggaaaattaatgaagttccaaagtttagatcaaaactggaataatggtggatggcgtaaagcagaggttgcacataaagttgttcataattatgaaaatgatatgatttttattagaccatttaaaaaagcataatttaaatcgaaggcaggacattgaaatatgaaattttcaactttaagtgaagaagaatttaccaactacaccaaaaagcacttcaaacattatacacagtctatagaattatataattatagaaataaaataaatcatgaagcacatattgtgggagtgaagaatgataaaaatgaagttatagctgcatgtttattaacagaggcacgaatttttaaattctacaaatatttctactctcatagaggtcctttacttgattatttcgatgctaaattagtttgttacttttttaaagaattatctaaattcatttataaaaatagaggagtatttattcttgttgatccatatttaatagagaatttaagagatgcaaatggtaggataataaagaattataataattcagtgatagtaaagatgctagggaaaattgggtatctccatcaaggttatacaacaggatattcaaataaaagtcaaattaggtggatttctgtattggatttaaaagataaagatgagaatcaacttttaaaagaaatggaataccaaactagaagaaatataaaaaagactattgagattggtgttaaggttgaagatttatctattgaagaaacaaatcgattttataaattgtttcaaatggctgaagaaaaacatggttttcatttcatgaatgaagattattttaaacgaatgcaagaaatatataaagataaggcaatgttaaagatagcttgtataaatcttaatgaatatcaagataaattaaaaatacaattattgaaaatcgaaaatgaaatgatgactgtgaacagagcattaaatgaaaatccaaattctaaaaaaaataaatcaaaattaaatcagttaaatatgcaattatctagtattaataatagaattagtaaaaccgaagaactaatatttgaagatggacctgttttggatttagctgctgctttatttatatgtactgatgatgaagtttattatctatcaagtggatcaaatccgaaatataatcagtatatgggtgcatatcatctacaatggcatatgataaaatatgcaaaatcacataatattaataggtataatttttatggaataacaggcgtctttagtaatgaggcggatgattttggtgttcaacaatttaaaaagggttttaatgcacatgttgaagaattaattggtgatttcatcaaaccagtaagaccaattctatataaatttgcaaaacttatttataaggtttaattataaagtatgttggaaattgaaattttaaattctttccaacatacttttcactttttaagtcagtatttttactccttaaaataacattacatcgacaatgtttttgtattagaaatgtaaaacaaaaatagaatatgattttgtatgattacaaaaaggagttgatttattgattaaactatttttgcttaagttatactgggcacacttttcgactaaacaaattcatcaatttttaatggcatatcctaatgtaattaaagaggagggaagaaaaaaagatagttatttatgtgaatgggtgaatagggaagaaaatgttcatttattacgtaaatactatgcttttataaaacttgatcataacgatattattaaagaactgcagaaattaaaagtaagttacattacatatatggattctgaatacccagtgctattaaaagaaatatatcaatttccattacttcttttctataaagggaacatcaaattaataaataatatgcatcatttggcagtagtaggtgcaagagattctacaagttatacccaacagtctttagaatttttattatcaaatgataaaagcaaatatttaacaattgtttccggccttgctcaaggagctgatgcaatggcacatcaaatagctttaaaatacaatctccctacaattgcagttttagcctttggccatcaaacacattatcccaaaagtacattagcattaagaaataaaatagaagaaaaaggtttagttatatctgaatatccaccacatacaccaatcgctaaatatagatttcctgagcgcaatagaattatcagcggtttgtcaaaaggggttttaattactgaggctaaggaacaaagtggcagtcacatcacgatagattttgcattagagcaaaatagaaatgtttatgttttacctggatctatgtttaatcctatgacaaaaggtaatttattacgtatccaagaaggtgctaaggtagtattaaacgctaatgatatatttgaagactactatatttaaaactaaaaataacgagttgcttcatatttcttttgtttccctttgtaatttattttttaataaaatctataaaaaatagacagggaaaatgatttgtttagatataaaacgttgacaaaagcaaaattaagcgtttatcatttatctttagtaattagattagcgagggggaaatgacattggcagataatttagtcattgttgaatcgcctgcaaaagcaaaaaccattgaaaagtatttaggtaagaaatataaagttatagcttcaatgggacacgtcagagacttaccaagaagtcaaatgggtgtcgacactgaagataattacgaaccaaaatatataacaatacgcggaaaaggtcctgttgtaaaagaattgaaaaaacatgcaaaaaaagcgaaaaacgtctttctcgcaagtgaccccgaccgtgaaggtgaagcaattgcttggcatttatcaaaaattttagagcttgaagattctaaagaaaatcgcgttgttttcaacgaaataactaaagacgctgttaaagaaagttttaaaaatcctagagaaattgaaatgaacttagtcgatgcacaacaagcgcgtcgaatattagatagattagttggctataacatctcgccagttctttggaaaaaagtaaaaaaagggttgtcagcgggtcgagttcaatctgttgcacttcgtttagtcattgaccgtgaaaatgaaattcgaaactttaaaccagaagaatattggactattgaaggagaatttagatacaaaaaatcaaaattcaatgctaaattccttcattataaaaataaaccttttaaactaaaaacgaaaaaagatgttgagaaaattacagctgcattagatggagatcaattcgaaattacaaacgtgactaaaaaagaaaaaacgcgtaatccagcaaacccatttacaacttctacattacaacaagaggcggcacgtaaattaaactttaaagcaagaaaaacaatgatggtcgcacaacaattatatgaaggtatagatttgaaaaaacaaggtacgattggtttaataacatatatgagaaccgattctacacgtatttcagatactgccaaagttgaagcaaaacagtatataactgataaatacggtgaatcttacacttctaaacgtaaagcatcagggaaacaaggtgaccaagatgcccatgaggctattagaccttcaagtactatgcgtacgccagatgatatgaagtcatttttgacgaaagaccaataccgattatacaaattaatttgggaacgatttgttgctagtcaaatggctccagcaatacttgatacagtctcattagacataacacaaggtgacattaaatttagagcgaatggtcaaacaatcaagtttaaaggatttatgacactttatgtagaaactaaagatgatagtgatagcgaaaaggaaaataaactgcctaaattagagcaaggtgataaagtcacagcaactcaaattgaaccagctcaacactatacacaaccacctccaagatatactgaggcgagattagtaaaaacactagaagaattgaaaattgggcgaccatcaacttatgcaccgacaatagatacgattcaaaagcgtaactatgtcaaattagaaagtaagcgttttgttcctactgagttgggagaaatagttcatgaacaagtgaaagaatacttcccagagattattgatgtggaattcacagtgaatatggaaacgttacttgataagattgcagaaggcgacattacatggaggaaagtaatcgacggtttctttagtagctttaaacaagatgttgaacgtgctgaagaagagatggaaaagattgaaatcaaagatgagccagccggtgaagactgtgaaatttgtggttctcctatggttataaaaatgggacgctatggtaagttcatggcttgctcaaacttcccggattgtcgtaatacaaaagcgatagttaagtctattggtgttaaatgtccaaaatgtaatgatggtgacgtcgtagaaagaaaatctaaaaagaatcgtgtcttttatggatgttcgaaatatcctgaatgcgactttatctcttgggataagccgattggaagagattgtccaaaatgtaaccaatatcttgttgaaaataaaaaaggcaagacaacacaagtaatatgttcaaattgcgattataaagaggcagcgcagaaataatatttttatttcctagatacattttaagattgttaaatagaatcattagtgaatcttattttaaagatagtaaaggattaatctaaataagtgcggataatataaacataacaacataattaaaagacataaatgacaataaaaggagtatagaaatgactcaaactgtaaatgtaataggtgctggtcttgccggttcagaagcggcatatcaattagctgaaagaggaattaaagttaatctaatagagatgagacctgttaaacaaacaccagcgcaccatactgataaatttgcggaacttgtatgttccaattcattacgcggaaatgctttaactaatggtgtgggtgttttaaaagaagaaatgagaagattgaattctataattattgaagcggctgataaggcacgagttccagctggtggtgcattagcagttgatagacacgatttttcaggttatattactgaaacacttaaaaatcatgaaaatatcacagttattaatgaagaaattaatgccattccagatggatacacaattatcgcaacaggaccacttactacagaaacccttgcgcaagaaatagtggacattactggtaaagatcaactttatttctatgatgcggctgctccaattattgaaaaagaatctattgatatggataaagtttacttaaagtcccgttatgataaaggtgaagctgcatatttaaactgtcctatgactgaggatgaatttaatcgcttttatgatgcagtattagaagctgaagttgcgcctgtaaattcatttgaaaaagaaaaatatttcgagggttgtatgccttttgaagtaatggcagaacgcggacgcaagacattactatttggaccaatgaaaccagtaggattagaagatccaaagactgggaaacgtccttatgcggtggttcaattaagacaagatgacgctgctggtacactctacaatattgttggcttccaaacgcatttaaaatggggagctcaaaaagaagtcattaaattaattccaggcttagaaaatgttgatattgttagatatggtgtgatgcatagaaataccttcattaattcaccggacgtattaaacgagaaatatgaattgatttcacaaccaaacatacagtttgcgggacaaatgactggtgttgaaggttatgtagaaagcgcagctagcggcttagttgcaggtatcaatcttgcgcataaaatattaggcaagggtgaggtagtatttccgagagaaacaatgattggaagtatggcttactatatttctcatgctaaaaacaataagaatttccaacctatgaatgctaacttcgggttattaccatctttagaaactagaattaaagataaaaaagaacgctatgaagcacaagctaatagagctttggattacttagaaaatttcaaaaaaactttataaaatagttagaaagactagatatgctattcattcttaagtcatcaacgagtaagtaatgactttctaaatggaaaatacttatcctagtctttttaattttggaattgttacgtatttctgacaatttagaattcgcattcaaaaaatatctaaataaataacacgcaataagttgattgatgtaacatgtaagagaatgttttaaataaactttatttaaaaggcaatgaaataataaatggcaaggctattaataaagacttttagtaattaatttaaaaaagaggtattctaattaacaggttttccgattagttacaattatttaattctcaaaagatttagaattgattatcaaattactgtaagccctttgctgtatatgctacaattcttattgatggagggtaaatgtattgaatcatattcaagatgcgtttttaaatacattgaaagttgaacggaatttttcggaacacacattgaaatcatatcaagatgacttaattcagtttaatcaatttttagaacaagaacatttagagttgaatacttttgaatacagagatgctagaaattatttgagctatttatattcaaatcatttgaaaagaacatctgtttctcgtaaaatctcaacgttaagaactttctatgaatattggatgacgcttgatgagaacattattaatccatttgttcaattagtacatccgaaaaaagaaaaatatcttccgcaattcttttacgaagaagaaatggaagcgttattcaaaactgtagaagaggacacttcaaaaaatttacgggatcgagttattcttgaattgttgtatgctacaggcatccgtgtttcggaattagtaaatattaaaaaacaagatatagatttttacgcgaatggtgttaccgtattaggaaaagggagcaaagagcgctttgtaccgtttggtgcttattgtagacaaagcatcgaaaattatttagaacatttcaaaccaattcagtcatgcaatcatgattttcttattgtaaatatgaagggtgaagcaatcactgaacgcggtgtacgatatgttttaaatgatattgttaaacgaacagcaggcgtaagtgagattcatccccacaagctcagacatacatttgcaacgcatttattgaatcaaggtgcagacctaagaacagtacaatcgttattaggtcatgttaatttgtcaacaactggtaaatatacacacgtatctaaccaacaattaagaaaagtgtatctaaatgcacatcctcgagcgaaaaaggagaatgaaacatgagtaatacaacattacatgcaacaacaatttatgctgtaagacataatgggaaagcagctatggctggagatgggcaagtaacgcttggtcaacaagtcatcatgaaacaaacggcaagaaaagtgcgacgtttatatgaaggtaaagtgttagctggtttcgcaggtagtgtagcagatgcgtttacgttatttgaaaaattcgaaacaaaattacaacagtttagtggtaacttagaaagagctgctgttgaattggcacaagaatggcgaggcgataaacaattacgtcaattagaagctatgctaattgtaatggataaagatgctattttagttgtcagtggaactggcgaagttattgctccagatgatgaccttatcgctattggatcaggaggcaactacgcattaagcgcaggacgtgcattgaaacgccatgcatcgcatttgtctgctgaagaaatggcatatgagagcttgaaagtagcggctgatatttgtgtctttaccaacgataatattgttgtcgaaacactataataatcagagcacgataaataattacgagcaattaattttagttaaaagacggaggaatgaaattaatggatacagctggaataagattaactccaaaagaaatcgtatctaaattaaatgaatacatcgttggacaaaatgatgctaaacgtaaagtggcaattgccctacgtaatcgatacagaagaagtttattagatgaggaatcaaagcaagaaatttcacctaaaaatattttgatgattggaccaaccggcgttggtaaaactgaaattgcaagaagaatggccaaagttgtcggcgcgccatttataaaagtagaagctactaaatttactgaggtaggttatgtaggacgagatgttgaaagtatggttagagatcttgttgatgtttcagtaagattagtcaaggcgcagaaaaaatcattggtacaagatgaagcaacagctaaggccaatgaaaaacttgttaagttattagttccaagtatgaaaaagaaagcgtctcaaacgaataatcctttagagtcacttttcggaggtgcaattccaaatttcggacaaaataacgaagatgaagaagaaccacctactgaggaaattaaaacaaaacgttctgaaattaagagacagctagaagaaggcaaacttgaaaaagaaaaggtaagaattaaagtcgaacaagatcctggtgctttaggtatgctaggtacaaatcaaaatcagcaaatgcaagagatgatgaatcaattaatgcctaaaaagaaagttgagcgagaagttgctgttgagacggcaaggaaaatcttagctgatagttatgcggatgaactaattgatcaagaaagcgctaaccaagaagcgcttgaattagcagaacaaatgggtatcatctttatagatgaaatcgacaaagttgcgacgaataatcataatagtggtcaagatgtctcaagacaaggtgttcaaagagatattttacctatacttgaaggtagcgttattcaaaccaaatatggtactgtgaatactgaacatatgctgtttataggtgctggagctttccatgtatctaagccgagtgacttgataccagaattgcaaggtcgttttccgattagagttgaacttgatagtttatcggtagaagattttgtaagaattttgacagaaccaaaattgtcattaattaaacaatatgaagcattgcttcaaacagaagaagttactgtaaactttaccgatgaagcaattactcgcttagctgagattgcttatcaagtaaatcaagatacagacaacattggtgcacgtcgacttcatacaattttagaaaagatgctagaagatttatcattcgaagcaccaagtatgccgaatgcagttgtagatattaccccacaatatgttgatgataaattaaaatcaatttcaacaaataaagatttaagtgcatttattctataaaaatatacaaaaggagaaaaattcatgagcttattatctaaaacgagagagttaaacacgttacttcaaaaacacaaaggtattgcggttgattttaaagatgtagcacaaacgattagtagcgtaactgtaacaaatgtatttattgtatcgcgtcgaggtaaaattttaggatcgagtctaaatgaattattaaaaagtcaaagaattattcaaatgttggaagaaagacatattccaagtgaatatacagaacgattaatggaagttaaacaaacagaatcaaatattgatatcgacaatgtattaacagtattcccacctgaaaacagagaattattcatagatagtcgtacaactatcttcccaattttaggtggaggggaaagattaggtacattagtacttggtcgagtacatgatgattttaatgaaaatgatttggtactaggtgaatatgctgctacagttattggtatggaaatcttacgtgagaagcatagtgaagtagaaaaagaagcgcgcgataaagctgctattacaatggcaattaattcattatcttattctgaaaaagaagcgattgaacatatctttgaagaacttggcggtacggaaggcctattaatcgcatcaaaagttgcagatagagttggtattactagatctgtaattgtaaatgcactacgtaaattagaaagtgctggtgtaattgaatcacgttctttaggaatgaaaggtactttcattaaagttaaaaaagaaaaattcttagatgaattagaaaaaagtaaataagtcgatgagtctgggacataattcaatgtcctagtcgtgacgatgttatcttggcggtagtcaatgaaatgactttgatgattatgttgaagtcatttctttatttttgtctaattttcaatcaaattgatatttcacattaacttgatagaattacctttaaatttatggaaaaatgcttgaaaaacatttgctttagacacggcattatgttatatttattttcggctataaagccaatacacacatatcaaacgtgattgtgtaaagggtgcaatatttatatattgtctttacaatagtttgctatggaggtaattaaccaataggaggaatttataatggcagtaatttcaatgaaacaattactagaagcgggtgttcacttcggtcaccaaacacgtcgttggaacccaaaaatgaaaaaatatatcttcactgagagaaatggtatttatatcatcgacttacaaaaaacagtgaaaaaagtagacgaggcatacaacttcttgaaacaagtttcagaagatggtggacaagtcttattcgtaggaactaaaaaacaagcacaagaatcagttaaatctgaagcagaacgtgctggtcaattctacattaaccaaagatggttaggtggattattaactaactataaaacgatctcaaaacgaatcaaacgtatttctgaaattgaaaaaatggaagaagatggtttattcgaagtattacctaaaaaagaagtagtagaacttaaaaaagaatacgaccgtttaatcaaattcttaggcggaattcgtgatatgaaatcaatgcctcaagcattattcgtagttgacccacgtaaagagcgtaatgcaattgctgaagctcgtaaattaaatattcctatcgtaggtatcgttgacactaactgtgatcctgacgaaattgactacgttatcccagcaaacgacgatgctatccgtgcggttaaattattaactgctaaaatggcagatgcaatcttagaaggtcaacaaggcgtttctaatgaagaagtagctgcagaacaaaacatcgatttagatgaaaaagaaaaatcagaagaaacagaagcaactgaagaataatcaactgttgaatctgacttagatatagtttaaatgggtgataagatattaatgcttatcaccttttttaaaaagaaaatcgaggcaaattacaaatattcaattagagtattggcaatcttgcctataataatgctaaaatcataatatataaaatgataacttattggaggaataatgaatggcaactatttcagcaaaacttgttaaagaattacgtgaaaaaactggcgcgggtatgatggattgtaaaaaagcgctaactgaaactgatggtgacatcgataaagcgattgactacctacgtgaaaaaggtattgctaaagcagctaaaaaagcagaccgtattgcggctgaaggtttagtacatgtagaaactaaaggtaacgacgcagttatcgttgaaatcaactctgaaacagactttgttgctcgtaacgaaggtttccaagagttagttaaagaaatcgctaatcaagtattagatacaaaagctgaaactgttgaagctttaatggaaacaactttaccaaatggtaaatcagttgatgaaagaattaaagaagcaatttcaacaatcggtgaaaaattaagtgttcgtcgttttgctatcagaactaaaactgataacgatgctttcggcgcttacttacacatgggtggacgcattggtgtattaacagttgttgaaggttcaactgacgaagaagcagcaagagacgttgctatgcatatcgctgcaatcaaccctaaatatgtttcttctgaacaagttagcgaagaagaaatcaaccacgaaagagaagttttaaaacaacaagcattaaatgaaggtaaaccagaaaacatcgttgaaaaaatggtggaaggacgtttacgtaaatacttacaagaaatttgtgctgtagatcaagacttcgttaaaaaccctgatgtaacagttgaagctttcttaaaaacaaaaggtggaaaacttgttgacttcgtacgctatgaagtaggcgaaggtatggaaaaacgcgaagaaaactttgcggatgaagttaaaggacaaatgaaataatctgtcataaagtaaaacaaggaagaagacacctttaatgttgctttattaaaatgtaaatcattctaataaaacgacaactgtgtcttctttacttgtatatgttacatatattcacgatagagaggataagaaaatggctcaaatttctaaatataaacgtgtagttttgaaactaagtggtgaagcgttagctggagaaaaaggatttggcataaatccagtaattattaaaagtgttgctgagcaagtggctgaagttgctaaaatggactgtgaaatcgcagtaatcgttggtggcggaaacatttggagaggtaaaacaggtagtgacttaggtatggaccgtggaactgctgattacatgggtatgcttgcaactgtaatgaatgccttagcattacaagatagtttagaacaattggattgtgatacacgagtattaacatctattgaaatgaagcaagtggctgaaccttatattcgtcgtcgtgcaattagacacttagaaaagaaacgcgtagttatttttgctgcaggtattggaaacccatacttctctacagatactacagcggcattacgtgctgcagaagttgaagcagatgttattttaatgggcaaaaataatgtagatggtgtatattctgcagatcctaaagtaaacaaagatgcggtaaaatatgaacatttaacgcatattcaaatgcttcaagaaggtttacaagtaatggattcaacagcatcctcattctgtatggataataacattccgttaactgttttctctattatggaagaaggaaatattaaacgtgctgttatgggtgaaaagataggtacgttaattacaaaataaatttagaggtgtaaaataatgagtgacattattaatgaaactaaatcaagaatgcaaaaatcaatcgaaagcttatcacgtgaattagctaacatcagtgcaggaagagctaattcaaatttattaaacggcgtaacagttgattactatggtgcaccaacacctgtacaacaattagcaagcatcaatgttccagaagcacgtttacttgttatttctccatacgacaaaacttctgtagctgacatcgaaaaagcgataatagcagctaacttaggtgttaacccaacaagtgatggtgaagtgatacgtattgctgtacctgccttaacagaagaacgtagaaaagagcgcgttaaagatgttaagaaaattggtgaagaagctaaagtatctgttcgaaatattcgtcgtgatatgaatgatcagttgaaaaaagatgaaaaaaatggcgacattactgaagatgagttgagaagtggtactgaagatgttcagaaagcaacagacaattcaataaaagaaattgatcaaatgattgctgataaagaaaaagatattatgtcagtataaaactaatatacaatgacatattaaaatgccagtattaaacgataatgtaacatttaaaatgggcatgtttaattaaatcaaagatgcatgtgataatttaaattcacaatgagcataaaaatggtgtttaaacaagttaattaaacatatactttataaataataggcattaggtatattgctataataaagttatgtaatttttaacctcagtatgtatgtcacatttctggtgtaaactgtaccgagtcagactttggtacagtttttttatttgcttattcaatgcattaaatgagtatgataaaatgataatgattgtttagtaacttatactatatgacagagatgatcaggctcggaggaaagaccatgtttaaaaagctaataaataaaaagaacactataaataattataatgaagaattagactcgtctaatatacctgaacatatcgctattattatggatggtaatgggcgatgggctaagaagcgaaaaatgcctagaattaaaggtcattacgaaggtatgcaaacaataaaaaaaattactagggtagctagtgatattggtgttaagtacttaactttatacgccttttccactgaaaattggtcaagacctgaaagtgaagtaaattatattatgaatttgcctgtcaatttcttaaagacattcttaccggaactaattgaaaaaaatgtcaaagttgaaacaattggatttactgataagttgccaaaatcaacgatagaagcaattaataatgctaaagaaaagacagctaataataccggcttaaaattaatatttgcaattaattatggtggcagagcagaacttgttcatagtattaaaaatatgtttgacgagcttcatcaacaaggtttaaatagtgatatcatagatgaaacatatataaacaatcatttaatgacaaaagactatcctgatccagagttgttaattcgtacttcaggagaacaaagaataagtaatttcttgatttggcaagtttcgtatagtgaatttatctttaatcaaaaattatggcctgactttgacgaagatgaattaattaaatgtataaaaatttatcagtcacgtcaaagacgctttggcggattgagtgaggagtagtatagtatgaaagttagaacgctgacagctattattgccttaatcgtattcttgcctatcttgttaaaaggcggccttgtgttaatgatatttgctaatatattagcattgattgcattaaaagaattgttgaatatgaatatgattaaatttgtttcagttcctggtttaattagtgcagttggtcttatcatcattatgttgccacaacatgcagggccatgggtacaagtaattcaattaaaaagtttaattgcaatgagctttattgtattaagttatactgtcttatctaaaaacagatttagttttatggatgctgcattttgcttaatgtctgtggcttatgtaggcattggttttatgttcttttatgaaacgagatcagaaggattacattacatattatatgcctttttaattgtttggcttacagatacaggggcttacttgtttggtaaaatgatgggtaaacataagctttggccagtaataagtccgaataaaacaatcgaaggattcataggtggcttgttctgtagtttgatagtaccacttgcaatgttatattttgtagatttcaatatgaatgtatggatattacttggagtgacattgattttaagtttatttggtcaattaggtgatttagtggaatcaggatttaagcgtcatttcggcgttaaagactcaggtcgaatactacctggacacggtggtattttagaccgatttgacagctttatgtttgtgttaccattattaaatattttattaatacaatcttaatgctgagaacaaatcaataaacgtaaagaggagttgctgagataatttaatgaatctcagaactccttttgaaaattatacgcaatattaactttgaaaattatacgcaatattaactttgaaaattatacgcaatattaactttgaaaattagacgttatattttgtgatttgtcagtatcatattataatgacttatgttacgtatacagcaatcatttttaaaataaaagaaatttataaacaatcgaggtgtagcgagtgagctatttagttacaataattgcatttattattgtttttggtgtactagtaactgttcatgaatatggccatatgttttttgcgaaaagagcaggcattatgtgtccagaatttgcgatcggtatggggccaaaaatttttagttttagaaaaaatgaaacactttacactattaggttattgcctgttggtggatatgttcgtatggcaggagatggcttagaagagccaccagtcgagcccggtatgaacgttaaaattaaacttaatgaagaaaatgaaataacacatatcatattagatgatcatcataagtttcaacaaattgaagcgatcgaagttaaaaaatgtgattttaaggatgacttattcatagaaggtatcactgcttatgataatgaaagacatcattttaaaattgctagaaagtctttctttgttgaaaatggtagcttagttcaaattgctccgagagacagacaatttgcacataaaaagccatggccgaaatttttaacattatttgcgggaccgttatttaactttatattagctttagtcctatttattggtcttgcatattatcaaggcacgcctacgtctactgtagaacaagtcgcagataagtatccagctcaacaagcaggattacaaaaaggtgataagatcgtccaaattggcaaatataaaatatctgaatttgatgatgttgataaggcgttagataaagttaaagataataagacgactgttaaatttgaacgtgatggtaaaacaaagtcagttgaattaacacctaaaaagactgaaaaaaaactgactaaagtaagttcagagacgaagtatgttctcggattccaaccagcgagtgaacatacactttttaaaccaattgtattcggatttaaaagctttttaatcggtagtacttatatttttacagctgtagtaggtatgttggctagtatatttacgggcggattctcatttgatatgttaaatggtccggttggtatttatcataacgtcgactcagttgttaaagcgggtatcattagcttaattggttacactgcgttattaagtgtaaacttaggtattatgaatttaattcctattcctgcactagacggtggtcgtattttatttgttatatatgaagcgattttcagaaaaccagttaataaaaaagcggaaacaacgattattgctattggtgccattttcatggtcgttataatgatattagtaacgtggaatgatattcgacgatatttcttataatttaggaggataaataattatgaagcaatccaaagtttttataccaacgatgcgtgacgtgccatcagaagcagaagcacaaagtcatcgtttattattgaaatcgggtttgataaaacaaagtacaagtgggatttatagttatttaccgctagcaacacgtgtgttaaataatattactgcaattgtgcgacaagaaatggaacgtatcgattctgttgaaattttaatgccagcgttacaacaagctgaattatgggaagaatcaggacgttggggtgcatatggcccagaattaatgcgtttacaagatagacatggaagacaatttgcattaggtccaacacatgaagaattagttacatcaatagtaagaaatgaattgaaatcatacaaacaattaccgatgacattattccaaattcaatctaaattccgtgatgaaaagagaccacgttttggtttacttcgtgggcgtgaatttattatgaaagatgcatattcattccatgctgacgaggcatcattagatcaaacgtatcaagatatgtatcaagcgtatagccgtatttttgagagagttggcattaacgcaagaccagtagttgcagattcaggtgctataggcggtagccatacacatgaatttatggcattaagtgctatcggtgaggatacaatcgtttacagtaaagaaagtgattatgctgctaacatcgaaaaagcagaagtcgtttacgaaccaaatcataagcatactactgtgcaacctttagaaaaaattgaaacaccaaatgttaagactgcgcaagaattggcagacttcttaggtagaccagtagatgaaatcgttaaaacgatgattttcaaagttgatggcgaatatattatggttttagtgcgtggccatcatgaaattaatgacattaaattaaaatcttatttcggcacagataatattgaattagcaacacaagacgaaattgttaatttagttggtgcaaatcctggttcactaggtcctgtaattgataaagaaatcaaaatttatgcagataattttgtgcaagatttaaataatttagttgtcggtgctaacgaagatggttatcacttaattaatgtaaatgtaggtagagacttcaacgttgatgaatatggcgatttccgttttattttagaaggcgaaaagttaagtgatggttcaggcgttgcacattttgctgaaggtattgaagttggtcaagtattcaaattgggtactaagtattcagaatcaatgaatgctacattcttagataaccaaggaaaagctcaatctttaattatgggttgttacggaattggaatttctagaacgctaagtgcgattgttgaacaaaatcacgatgataatggaattgtttggcctaaatcagttactccgtttgatttacatttaatttctattaatcctaagaaagatgatcaacgagaactagcagatgcactatatgctgaatttaatactaaatttgatgtgttgtacgatgatcgtcaggaacgtgcaggtgttaaatttaatgatgccgatttaattggtttaccactgcgaattgttgttggtaaacgtgcatcggaaggtattgtagaagttaaagaacgtttaacaggtgatagcgaagaagttcacattgatgacttaatgactgtcattacaaataaatatgataacttaaaataattaagatcgaatgaattataagagtaggaaaaagctgaaagaaatctgatgcttatgtcctgctcttattatttttgatataatgattattcgatgaaaaatgactgaagacatagtataattaaagataaatttgttttaacaatataatgattagccaaatataaagcatttaattttctatcattactatgctcacataatctaaatattgttcgaacacgtaaaagtaatttctatttaaggtggtaattgtcttggcaatgacagagcaacaaaaatttaaagtgcttgctgatcaaattaaaatttcaaatcaattagatgctgaaattttaaattcaggtgaactgacacgtatagatgtttctaacaaaaacagaacatgggaatttcatattacattaccacaattcttagctcatgaagattatttattatttataaatgcaatagagcaagagtttaaagatatcgccaacgttacatgtcgttttacggtaacaaatggcacgaatcaagatgaacatgcaattaaatactttgggcactgtattgaccaaacagctttatctccaaaagttaaaggtcaattgaaacagaaaaagcttattatgtctggaaaagtattaaaagtaatggtatcaaatgacattgaacgtaatcattttgataaggcatgtaatggaagtcttatcaaagcgtttagaaattgtggttttgatatcgataaaatcatattcgaaacaaatgataatgatcaagaacaaaacttagcttctttagaagcacatattcaagaagaagacgaacaaagtgcacgattggcaacagagaaacttgaaaaaatgaaagctgaaaaagcgaaacaacaagataacaacgaaagtgctgtcgataagtgtcaaattggtaagccgattcaaattgaaaatattaaaccaattgaatctattattgaggaagagtttaaagttgcaatagagggtgtcatttttgatataaacttaaaagaacttaaaagtggtcgccatatcgtagaaattaaagtgactgactatacggactctttagttttaaaaatgtttactcgtaaaaacaaagatgatttagaacattttaaagcgctaagtgttggtaaatgggttagggctcaaggtcgtattgaagaagatacatttattagagatttagttatgatgatgtctgatattgaagagattaaaaaagcgacaaaaaaagataaggctgaagaaaagcgtgtagaattccacttgcatactgcaatgagccaaatggatggtatacccaatattggtgcgtatgttaaacaggcagcagactggggacatccagccattgcggttacagaccataatgttgtgcaagcatttccagatgctcacgcagcagcggaaaaacatggcattaaaatgatatacggtatggaaggtatgttagttgatgatggtgttccgattgcatacaaaccacaagatgtcgtattaaaagatgctacttatgttgtgttcgacgttgagacaactggtttatcaaatcagtatgataaaatcatcgagcttgcagctgtgaaagttcataacggtgaaatcatcgataagtttgaaaggtttagtaatccgcatgaacgattatcggaaacgattatcaatttgacgcatattactgatgatatgttagtagatgcccctgagattgaagaagtacttacagagtttaaagaatgggttggcgatgcgatattcgtagcgcataatgcttcgtttgatatgggcttcatcgatacgggatatgaacgtcttgggtttggaccatcaacgaatggtgttatcgatactttagaattatctcgtacgattaatactgaatatggtaaacatggtttgaatttcttggctaaaaaatatggcgtagaattaacgcaacatcaccgtgccatttatgatacagaagcaacagcttacattttcataaaaatggttcaacaaatgaaagaattaggcgtattaaatcataacgaaatcaacaaaaaactcagtaatgaagatgcatataaacgtgcaagacctagtcatgtcacattaattgtacaaaaccaacaaggtcttaaaaatctatttaaaattgtaagtgcatcattggtgaagtatttctaccgtacacctcgaattccacgttcattgttagatgaatatcgtgagggattattggtaggtacagcgtgtgatgaaggtgaattatttacggcagttatgcagaaggaccagagtcaagttgaaaaaattgccaaatattatgattttattgaaattcaaccaccggcactttatcaagatttaattgatagagagcttattagagatactgaaacattacatgaaatttatcaacgtttaatacatgcaggtgacacagcgggtatacctgttattgcgacaggaaatgcacactatttgtttgaacatgatggtatcgcacgtaaaattttaatagcatcacaacccggcaatccacttaatcgctcaactttaccggaagcacattttagaactacagatgaaatgttaaacgagtttcattttttaggtgaagaaaaagcgcatgaaattgttgtgaaaaatacaaacgaattagcagatcgaattgaacgtgttgttcctattaaagatgaattatacacaccgcgtatggaaggtgctaacgaagaaattagagaactaagttatgcaaatgcgcgtaaactgtatggtgaagacctgcctcaaatcgtaattgatcgattagaaaaagaattaaaaagtattatcggtaatggatttgcggtaatttacttaatttcgcaacgtttagttaaaaaatcattagatgatggatacttagttggttcccgtggttcagtaggttctagttttgtagcgacaatgactgagattactgaagtaaacccgttaccgccacactatatttgtccgaactgtaaaacgagtgaatttttcaatgatggttcagtaggatcaggatttgatttacctgataagacgtgtgaaacttgtggagcgccacttattaaagaaggacaagatattccgtttgaaacatttttaggatttaagggagataaagttcctgatatcgacttaaactttagtggtgaatatcaaccgaatgcccataactacacaaaagtattatttggtgaggataaagtattccgtgcaggtacaattggtactgttgctgaaaagactgcttttggttatgttaaaggttatttgaatgatcaaggtatccacaaaagaggtgctgaaatagatcgactcgttaaaggatgtacaggtgttaaacgtacaactggacagcatccagggggtattattgtagtacctgattacatggatatttatgattttacgccgatacaatatcctgccgatgatcaaaattcagcatggatgacgacacattttgatttccattctattcatgataatgtattaaaacttgatatacttggacacgatgatccaacaatgattcgtatgcttcaagatttatcaggaattgatccaaaaacaatacctgtagatgataaagaagttatgcagatatttagtacacctgaaagtttgggtgttactgaagatgaaattttatgtaaaacaggtacatttggggtaccagaattcggtacaggattcgtgcgtcaaatgttagaagatacaaagccaacaacattttctgaattagttcaaatctcaggattatctcatggtacagatgtgtggttaggcaatgctcaagaattaattaaaaccggtatatgtgatttatcaagtgtaattggttgtcgtgatgatatcatggtttatttaatgtatgctggtttagaaccatcaatggcttttaaaataatggagtcagtacgtaaaggtaaaggtttaactgaagaaatgattgaaacgatgaaagaaaatgaagtgccagattggtatttagattcatgtcttaaaattaagtacatgttccctaaagcccatgcagcagcatacgttttaatggcagtacgtatcgcatatttcaaagtacatcatccactttattactatgcatcttactttacaattcgtgcgtcagactttgatttaatcacgatgattaaagataaaacaagcattcgaaatactgtaaaagacatgtattctcgctatatggatctaggtaaaaaagaaaaagacgtattaacagtcttggaaattatgaatgaaatggcgcatcgaggttatcgaatgcaaccgattagtttagaaaagagtcaggcgttcgaatttatcattgaaggcgatacacttattccgccgttcatatcagtgcctgggcttggcgaaaacgttgcgaaacgaattgttgaagctcgtgacgatggcccatttttatcaaaagaagatttaaacaaaaaagctggattatctcagaaaattattgagtatttagatgagttaggctcattaccgaatttaccagataaagctcaactttcgatatttgatatgtaaaatgaaataatcaaggtatttatttaatgcgtatggcgtagtcaaagaaatacaaaattgttgctggacacaaaattatgcccgtatttcttttcaatgtcttacgagtctattcaaatgtaatggtgaaataaaggaacaaacttttacaagaatctctgattaatagtgaagtcatttgtttcaagcataaacttatgctataattaagttgcttaaaaattagtgaactcaggcagaagagtgggagattcccgctcttttctatttgccaaaaagggaggcctgtatgagtaaaattacagaacaagtagaagtgattgttaaaccaattatggaagacttgaattttgaacttgtagacgttgaatatgtcaaagagggtagagatcattttcttagaatctctattgataaagaaggtggcgtagatttaaatgattgtacgctagcttctgaaaaaataagtgaagctatggatgcaaatgatcctattcctgaaatgtattatttagacgtagcgtcacctggtgcagaacgtccaattaaaaaagaacaagatttccaaaatgcaataactaaacctgtatttgtttctttatatgtaccaattgaaggtgaaaaggaatggttaggcattttacaagaagtcaataatgaaacaattgtagtacaagttaaaatcaaagcaagaacgaaagatatagagataccgagagacaaaatagcaaaagcacgtcacgcagttatgatttaacgtgatgaggaggaaaaaacgtgtcaagtaatgaattattattagctactgagtatttagaaaaagaaaagaagattcctagagcagtattaattgatgctattgaagcagctttaattactgcatacaaaaagaattatgatagtgcaagaaatgtccgtgtggaattaaatatggatcaaggtactttcaaagttatcgctcgtaaagatgttgttgaagaagtatttgacgacagagatgaagtggatttaagtacagcgcttgttaaaaaccctgcatatgaaattggtgatatatacgaagaagatgtaacacctaaagattttggtcgtgtaggtgctcaagcagcgaaacaagcagtaatgcaacgtcttcgtgatgctgaacgtgaaattttatttgaagaatttatagacaaagaagaagacatacttactggaattattgaccgtgttgaccatcgttatgtatatgtgaatttaggtcgtatcgaagctgttttatctgaagcagaaagaagtcctaacgaaaaatatattcctaacgaacgtatcaaagtatatgttaacaaagtggaacaaacgacaaaaggtcctcaaatctatgtttctcgtagccatccaggtttattaaaacgtttatttgaacaagaagttccagaaatttacgatggtactgtaattgttaaatcagtagcacgtgaagctggcgatcgctctaaaattagtgtcttctctgaaaacaatgatatagatgctgttggtgcatgtgttggtgctaaaggcgcacgtgttgaagctgttgttgaagagctaggtggtgaaaaaatcgacatcgttcaatggaatgaagatccaaaagtatttgtaaaaaatgctttaagcccttctcaagttttagaagttattgttgatgaaacaaatcaatctacagtagttgttgttcctgattatcaattgtcattagcgattggtaaaagaggacaaaacgcacgtctagctgctaaattaaccggctggaaaattgatattaaatcagaaacagatgcgcgtgaagcgggtatctatccagtagttgaagctgaaaaagtaactgaagaagatgttgctttagaagatgctgacacaacagaatcaaccgaagaggtaaatgatgtttcagttgaaacaaatgtagagaaagaatctgaataataggttggagtgaagtatctatgaaaaagaaaaaaattccgatgcgaaaatgtattctttcaaatgaaatgcatcccaaaaaagatatgattcgtgttgttgttaataaagaaggcgaaatctttgcggatgttactggaaagaaacaaggccgtggcgcatatgtttctaaagatgttgctatggttgaaaaagcacaacaaaaagaaattttagaaaaatattttaaagcatctaaagagcaattggatcctgtttacaaagaaattattagattaatttatagagaagagatcccaaaatgagtatagatcaaatattaaactttttaggattagcaatgagagctggtaaagtaaaaacaggtgaatcagtcattgttaatgagattaaaaaaggaaatttgaagctcgttattgttgcaaatgatgcgtctgataatacagctaaattaattacagataaatgtaagagttacaaagttccattcagaaagtttggaaatcgaaatgaattgggaatagcacttggaaaaggtgagcgtgttaatgtagggattactgacccaggctttgctaaaaagttgctatcaatgatagatgaatatcataaggagtgattatatgagtaaacaaagaatttacgaatatgcgaaagaattaaatctaaagagtaaagagattatagatgagttaaaaagcatgaatattgaggtttcaaatcatatgcaagctttggaagatgaccaaattaaagcattagataaaaagttcaaaaaagaacaaaagaacgacaataaacaaagcactcaaaataatcaccaaaaatcaaacaatcaaaaccaaaataaagggcaacaaaaagataacaaaaagaatcaacaacaaaataataaaggcaacaaaggcaataaaaagaataatagaaataataagaaaaataacaagaataataaaccacaaaatcaaccagctgctccaaaagaaataccatcaaaagtgacatatcaagaaggtattacagtaggcgaatttgcggataaattaaatgttgaatcatcagaaattatcaaaaaattattcttacttggtattgttgctaatatcaatcaatcattaaatcaagaaacaatcgaattaattgccgatgattatggcgttgaggttgaagaagaagttgtgattaatgaagaagacttatcaatctatttcgaagacgaaaaagatgatccagaggcaattgagagaccagcagttgtaacaattatgggacatgttgaccatggtaaaacgactttattagattcaattcgtcatacaaaagttacagcaggtgaagcaggcggaatcactcaacatattggtgcatatcaaattgaaaacgatggcaaaaaaatcactttcttagatacaccgggacatgctgcatttacaacgatgcgtgcgcgtggtgcacaagtaacagatattactattttagtagtagcagctgacgatggtgttatgccacaaacaattgaagcaattaaccatgctaaagaagcagaagtaccaattattgttgcagtaaataaaattgataaaccaacttcaaatcctgatcgagttatgcaagaattaactgaatatggtttaattcctgaagattggggcggcgaaacaattttcgttccactttctgcattaagtggtgatggtatcgacgatttattagaaatgataggattagttgcagaagttcaagaacttaaagcaaatcctaaaaaccgtgctgttggtacagttatcgaagctgaattagataaatcacgtggtccttctgcatcattattagtacaaaacggtacattaaatgttggtgatgcgattgtagttggtaatacttacggccgtatccgtgcaatggttaatgacttaggtcaaagaatcaaaacggctggtccatcaacgcctgttgaaattacaggtattaatgatgtgccacaagctggggatcgctttgttgtatttagtgatgaaaaacaagctcgtcgtattggtgaatcaagacacgaagctagcattatacaacaacgtcaagaaagtaaaaatgtttcattagataacctgtttgaacaaatgaaacaaggtgaaatgaaagatttaaacgttattattaaaggtgatgttcaaggttctgttgaagctttagctgcatcattaatgaaaattgatgttgaaggcgtaaatgttcgtatcattcatacagcggttggtgcaattaatgagtcagacgtgacacttgctaatgcctcaaatggtattatcattggtttcaatgttcgtccagacagtggtgcaaaacgtgctgcagaagctgaaaatgttgatatgcgtttacacagagttatttataatgttatcgaagaaattgaatcagcgatgaaaggtttacttgatccagaatttgaagaacaagttatcggacaagctgaagttcgtcaaacattcaaagtttctaaagttggtactattgctggatgttatgttactgaaggtaaaattacgcgaaatgctggtgtacgtattattcgtgatggtattgttcaatatgaaggcgaattagatacacttaaacgtttcaaagatgatgctaaggaagttgcaaaaggttatgaatgtggtattacaattgaaaactacaatgaccttaaagaaggcgatgttatcgaagcatttgaaatggttgaaattaagcgttaattaaataaattacaagctaaaagtatagttaagattgatatgctccctataaatattgcactttttaagtgtctactttatagggagcatatttgatactagcttttggttttttattagaatagattacctattaaaagttacgttatatggacatgattttgtataaaattttgtggtggcctagaatgatttttaatgacaaaatataatgtcgactattattggaaaattttctgttgaaatgcctatcttacggcaaactttatttgattttataggcttaatttattaaaataacgtgtgagctaaaataattgtttaagcattgttacactaaaaaatgcaaataacaattgaacttaaagataaagaggtgacaagaatgagcagtatgagagcagagcgtgttggtgaacaaatgaagaaggaattaatggatatcatcaacaataaagtcaaagatcctcgagttggttttattacaattacagatgttgttttaacaaatgatttatcgcaggctaaagtatttttaactgtattaggtaacgataaagaagtagaaaatacatttaaagcacttgataaagcaaaaggcttcattaagtctgaattaggttctagaatgcgattacgtattatgccggaattaatgtatgaatatgatcaatcaatcgaatatggtaataaaattgaacgaatgattcaagatttacacaaacaagatagataatttagtgttaggtatctggaaaatgtttgataatttcttaatatcggtatattaacattaaacagttaatacatagatgtgtagaaatagttaacattttccagtttttttatgaataaatttagttgatacgctattaaaatatattttaaaaaagaaggtgactatatgtataatgggatattaccagtatataaagagcgcggtttaacaagtcatgacgttgtattcaaattgcgtaaaatattaaaaactaaaaaaataggtcacacgggtacgcttgatcccgaagttgcaggcgtgttaccggtatgtataggtaatgcaacgagagttagtgattatgttatggatatgggcaaagcttatgaagcaactgtatcgataggaagaagtacaacgactgaagatcaaacgggtgatacattggaaacaaaaggtgtacactcagcagattttaataaggacgatattgaccgattgttagaaagttttaaaggtatcattgaacaaattccgccgatgtactcatccgtcaaagtaaatggtaaaaaattatatgaatatgcgcgtaataatgaaacagttgaaagaccaaagcgtaaagttaatattaaagacattgggcgtatatctgaattagattttaaagaaaatgagtgtcattttaaaatacgcgtcatctgtggtaaaggtacatatattagaacgctagcaactgatattggtgtgaaattaggctttccggcacatatgtcgaaattaacacgaatcgagtctggtggatttgtgttgaaagatagccttacattagaacaaataaaagaacttcatgagcaggattcattgcaaaataaattgtttcctttagaatatggattaaagggtttgccaagcattaaaattaaagattcgcacataaaaaaacgtattttaaatgggcagaaatttaataaaaatgaatttgataacaaaattaaagaccaaattgtatttattgatgatgattcagaaaaagtattagcaatttatatggtacaccctacaaaagaatcagaaattaaacctaaaaaagtctttaattaaaggagatagaatttatgaaagtcatagaagtgacacatcctatacaatctaaacagtatattacagaggatgttgcaatggcattcggatttttcgatggcatgcataaaggtcatgacaaagtctttgatatattaaacgaaatagctgaggcacgcagtttaaaaaaagcggtgatgacatttgatccgcatccgtctgtcgtgttgaatcctaaaagaaaacgaacaacgtatttaacgccactttcagataaaatcgaaaaaattagccaacatgatattgattattgtatagtggttaatttttcatctaggtttgctaatgtgagcgtagaagattttgttgaaaattatataattaaaaataatgtaaaagaagtcattgctggttttgattttacttttggtaaatttggaaaaggtaatatgactgtacttcaagaatatgatgcgtttaatacgacaattgtgagtaaacaagaaattgaaaatgaaaaaatttctacaacttctattcgtcaagatttaatcaatggtgagttgcaaaaagcgaatgatgctttaggctatatatattctattaaaggcactgtagtgcaaggtgaaaaaaggggaagaactattggcttcccaacagctaacattcaacctagtgatgattatttgttacctcgtaaaggtgtttatgctgttagtattgaaatcggcactgaaaataaattatatcgaggggtagctaacataggtgtaaagccaacatttcatgatcctaacaaagcagaagttgtcatcgaagtgaatatctttgactttgaggataatatttatggtgaacgagtgaccgtgaattggcatcatttcttacgtcctgagattaaatttgatggtatcgacccattagttaaacaaatgaacgatgataaatcgcgtgctaaatatttattagcagttgattttggtgatgaagtagcttataatatctagagttgcgtatagttatataaacaatctataccacacctttttcttagtaggtcgaatctccaacgcctaactcggattaaggagtattcaaacattttaaggaggaaattgattatggcaatttcacaagaacgtaaaaacgaaatcattaaagaataccgtgtacacgaaactgatactggttcaccagaagtacaaatcgctgtacttactgcagaaatcaacgcagtaaacgaacacttacgtacacacaaaaaagaccaccattcacgtcgtggattattaaaaatggtaggtcgtcgtagacatttattaaactacttacgtagtaaagatattcaacgttaccgtgaattaattaaatcacttggtatccgtcgttaatcttaatataacgtctttgaggttggggcatatttatgttccaaccttaatttatattaaaaaagctttttacaaatattaacatttattatatgttaagctaatattgagtgaataataaggttacaatgagataaagatgatataagtacacctagagtaataatcaagatattaaaaataaagtatgtttttttaaaaaatataacttatatttatactgataagggtgggacgataagtctattttgtaaataatagatggatatcccgctctctttttttccaattcaatattttataactaatattaaaatacgataataaatgatatgatataactattagattcaagagaggagatttataatgtctcaagaaaagaaagtttttaaaactgaatgggcaggaagatctttaacgattgaaacagggcaattagctaaacaagcaaatggcgctgtattggttcgttatggagatacagtcgtgttatcgacggcaactgcatcaaaagaacctcgtgatggagatttcttcccattaacagtgaactatgaagaaaaaatgtacgctgcgggtaaaattcctggtggatttaaaaagagagaaggacgtcctggtgacgatgcaacattaactgcgcgattaattgatagaccaattagacctttattccctaaaggatataagcatgatgttcaaattatgaacatggtattaagtgcagatcctgattgttcaccacaaatggctgcaatgattggttcatctatggcgcttagtgtgtcggatattccattccaagggccaatcgccggtgtaaatgtgggttatattgacggtaaatatatcattaacccaacagtagaagaaaaagaagtttctcgtttagaccttgaagtagctggtcataaagatgcggtaaacatggtagaggcaggcgctagtgagattactgaacaagaaatgttagaggcgattttctttggtcatgaagagattcaacgtttagttgatttccaacaacaaatcgtcgaccacattcaacctgttaaacaagaatttattccagcagagcgtgatgaagcgctagttgaacgtgtaaaatctttaaccgaagaaaaaggacttaaagaaacagttttaacatttgataaacaacaacgagatgaaaatcttgataacttaaaagaagaaatcgtcaatgaatttatcgatgaagaagatccagagaatgaattacttattaaagaagtttatgcaattttaaatgaattagtgaaagaagaagttcgacgtttaattgcagatgaaaaaattagaccagacggccgtaaacctgatgaaatccgtccattagattctgaagttggtattttacctagaacgcatggttcaggtctatttacacgtggtcagactcaagcactttcagttttaacattaggtgctttaggcgattatcaattaattgatggtttaggacctgaagaagaaaaaagattcatgcatcattacaacttcccgaatttttcagtaggtgaaactggtccagtacgtgcgccaggtcgtcgtgaaattggacatggtgcgttaggtgaaagagcattaaaatatattattcctgatactgctgatttcccatatacaattcgtattgtaagtgaggtacttgaatcaaatggttcatcatctcaagcgtcaatttgtggatcaacattagcattaatggatgcgggcgtaccgattaaagcaccagttgctggtattgctatgggccttgttacacgtgaagatagctatacgattttaactgatatccaaggtatggaagatgcattaggtgatatggactttaaagtcgctggtactaaagaaggtattacagcaatccaaatggatattaaaattgacggtttaacgcgtgaaattatcgaagaggctctagaacaagcgagacgtggtcgtttagaaataatgaatcatatgttacaaacaattgatcaaccacgtactgaattaagtgcttacgcgccaaaagttgtaactatgacaattaaaccagataagattagagatgttatcggacctggtggtaaaaaaattaacgaaattattgatgaaacaggtgttaaattagatattgaacaagatggtactatctttattggtgctgttgatcaagctatgataaatcgtgctcgtgaaatcattgaggaaattacacgtgaagcggaagtaggtcaaacttatcaagccactgttaaacgtattgaaaaatacggtgcgtttgtaggcctattcccaggtaaagatgcgttgcttcacatttcacaaatttcaaaaaatagaattgaaaaagtggaagatgtattaaaaatcggtgacacaattgaagttaagattactgaaattgataaacaaggtcgagtaaatgcttcacatagagcattagaagaataatatttaaagtcatatgacgacaatgtatcgtcatgtgatttttttatgccactttttacgaagtgacccgttttgaatttgttgtattgaacattttaaaacgctttattattttgtgtgcaactgttaattatcctgtatgtatagtgattaatagtgtacatcaagtgttttttaacttataatgaatagtgagtttatatatggacgggtaacaaatttaggaggtaagattttgagtttaataaagaaaaagaataaagatattcgcattataccattaggcggtgttggcgaaattgctaaaaatatgtatatcgttgaagtagacgatgaaatgtttatgttagatgctggacttatgtttccagaagacgaaatgctaggtattgatattgttataccagacatttcatacgtacttgaaaataaagataaattgaagggtatattccttacacacggacatgagcacgcgattggtgcagtgagttatgttttagaacaattagatgcaccagtatatggatctaaattgacaatagcgttaattaaagaaaatatgaaagcccgtaatattgataaaaaagttcgctactatacagttaataatgattcaattatgagattcaaaaacgtgaatattagtttctttaatacgacacacagtattcctgatagtttaggtgtttgtattcacacttcatatggtgccattgtgtatacaggtgaatttaagtttgaccaaagtttacatggacattatgcaccagatattaaacgtatggcagagattggtgaagaaggcgtatttgtcttaatcagtgattctactgaggcagagaaacctggatataatactccggaaaatgtgattgaacatcatatgtatgatgcttttgcaaaagtgcgaggtcgcttgatagtttcatgttatgcttcgaactttatacgtattcagcaagttttaaatattgctagcaagctaaatcgtaaagtgtcatttttaggaagatcacttgaaagttcatttaatattgctcgtaaaatggggtatttcgacattcctaaagatttgctaattcctataacagaagttgataattatcctaaaaatgaagtgataattatagctactggtatgcaaggagaacctgtagaagccttaagtcaaatggcgcaacataagcataaaattatgaatatcgaagaaggcgattctgtatttttagcaattacggcttctgctaatatggaagttatcattgcgaatacattaaatgagcttgtacgtgctggcgcacatattattccaaataacaaaaagattcatgcttcaagtcatggttgcatggaagaattaaaaatgatgattaatattatgaaacctgaatactttattcctgtacaaggtgaatttaaaatgcagatagcacatgcgaagctagcagctgaagcaggtgttgcaccagaaaagattttccttgtggaaaaaggagatgtcattaattacaacggtaaagatatgatattaaatgaaaaggtaaattcaggaaatattttaatagatggcattggtattggggatgtaggaaatatcgtgttgagagaccgtcatcttttagcagaagatggtatctttattgctgttgtaacgttagatcctaaaaatagacgtatagctgcgggacctgaaattcaatctcgtgggtttgtatatgtacgtgaaagtgaagacttattacgtgaagcagaagagaaagtacgtgaaatagtagaggctggtttacaagaaaaacgcatagaatggtctgaaattaaacaaaatatgcgtgatcaaattagtaaactattattcgaaagtacaaaacgtcgtcctatgattattccagtaatttctgaaatttaatcaaaaagtcattaacataaaagaggtcagaacaagtcactgaaatataatggttgtcatggacaatttacttatattttatgatggtcaattgaaggggtaacgattaatctgttatcttaagtaaattgatacatagatgatattgttctaacctctttcatcgtctgtttggactacatattctaaacatcaaataggaaattatatataataacgtcgttttaactaaggcaacataaggaggtgcgtcaattggcacaagcaaaaaagaaatcgacagctaagaaaaaaacaacatcaaaaaaaagaacaaattcgaggaaaaagaagaatgataatccgatacgttatgtcatagctattttagtagttgtattaatggtgttgggtgttttccaattaggaataataggtcgtctaattgacagcttctttaattatttatttgggtacagtagatatttaacatatattttagtactcttagcaactggttttattacatactctaaacgtattcctaaaactagacgaacggctggttcgattgtattgcaaattgcattgctatttgtatcacagttagtttttcattttaatagtggtatcaaagctgaaagagaacctgtactttcttatgtgtatcagtcataccaacacagtcatttcccaaattttggtggcggtgtattaggcttttatttattagagttaagcgtacctttaatttcattatttggtgtatgtattattactattttattattatgctcaagtgttattttattaacaaaccatcaacatcgtgaagttgcaaaagttgcactggaaaatataaaagcttggtttggttcatttaatgaaaaaatgtcggaaagaaaccaagaaaaacaattgaagcgtgaagaaaaagcaagacttaaagaagaacaaaaggcacgtcaaaatgaacagccacaaataaaagatgtgagtgattttacggaagtgcctcaagaaagagatattccaatttatgggcatactgaaaatgaaagtaaaagccagagtcaaccaagtcgaaaaaaacgagtgtttgatgcagagaatagttcgaataacatcgtaaatcatcatcaagcagatcagcaagaacaattaacagaacaaactcataacagtgttgaaagtgaaaacactattgaagaagctggtgaagttacgaatgtatcgtatgttgttccaccgttaactttacttaatcaacctgcaaaacaaaaagcaacatctaaagctgaagtgcaacgtaaaggacaagtactagagaatacattaaaagattttggggtaaatgcaaaagtgacacaaattaaaattggtcctgcagtaactcaatatgaaattcaaccagctcaaggggttaaagtgagtaaaattgtaaacttgcataatgatattgcattagctttagcagcaaaagatgttagaatcgaagcgccaatacctggtcgttctgcagtaggtattgaagtgccaaatgagaaaatttcattagtttcactaaaagaagttttagatgaaaaattcccgtctaataataaactagaagttggattaggaagagatatatcaggtgatccaattactgttccactaaatgaaatgccacacttattggtggcaggatcgacgggtagtggtaaatctgtttgtataaatggtattattacaagtattttattaaatgctaagccgcatgaagttaaacttatgttaatcgatccgaaaatggttgaactaaatgtttataacggaattccacacttattaattccggttgttacaaatcctcataaagctgctcaagctttagaaaaaattgtagctgagatggaaagacgttatgatttattccaacattcatcaactagaaacattaaaggttataacgaattaatccgtaagcaaaatcaagaattagatgagaagcaaccagaattaccttatatcgttgttattgtagatgagcttgcagatttaatgatggtagctggtaaagaagttgaaaatgcgattcaacgtattacacaaatggcacgtgcagcaggtatacatttaattgtagcgacacaaagaccttctgtggatgtaattacaggtatcattaaaaataatattccatctagaatagcttttgctgtgagttctcaaacagattcaagaactattattggtactggcggcgcagaaaagttacttggtaaaggtgacatgttatacgttggaaatggtgactcatcacaaacacgtattcaaggggcgtttttaagtgaccaagaggtgcaagatgttgtaaattatgtagtagaacaacaacaggcaaattatgtaaaagaaatggaaccagatgcaccagtggataaatcggaaatgaaaagtgaagatgctttatatgatgaagcgtatttgtttgttgttgaacaacaaaaggcaagtacatcattgttacaacgccaatttagaattggttataatagagcatctaggttgatggatgatttagaacgcaatcaggtaatcggtccacaaaaaggaagcaagcctagacaagttttaatagatcttaataatgacgaggtgtaaaaaaatgtcagaaatgaatgcggtatataacgttaaacaatacattttaaatttgattaagcaaaataaattggaatatggtgaccaacttccaagtaatttatcaattgccagagaattaaatgtaaaaaccgacgatgtttatgaagcaattcaggcattgattactgaacaagtcattaaagataattttgaagagggcacaagtgttaagtcactgccccctttcttttatccattgaatgaacttataagtattgggcaaatgattaaaaatgcaggatttgaatgcggaactgaatacttaaattttgatgagcaaccagcaactatgttagatgcaaatttgttgagcgttgaagaaggatatccagtaaccattatagaacgattacgaactgccgatggagaaccggtcgtctattgtttagataaaattgctaaaaaagaattaacatgtacagagtatcaaatgagcaatggatcgattctaagtgcgataaaagaacaaagtaatcataatatttgttatgctgatacagaaattgaagcggtaaattatgaacctcgaatatccgaagtactgaatgcttcgccacacgaaggtttgattttattaaaaattacgcactataatgaatcagatgaacctattttgtattcattaaattatatgaaaaatagcttagttcaatttaaaatcactagaaaaatatagatgtaagaagatatagaggaggctatatatttgagtagacaatctcaaccaaatatacatatcaaagtttcaccaacaactaaatttaaaacaactactatagtttttaaatttatggcacctttagaatatgacacaataacagctagatcattattaagcaaattattagttcgagcaactaagaaatggccaaccgataagtcgtttaataatcacttagccgatttatatggtgcgtatgtgaatagtacaatttcaaaattcaaagatcagcatgtcattacattttcattagaaattgttaatgaacgttatttaagaaacggtgaatcattatttaatcaaggattagatttattacaagaaatcatttggaatccattaattgaaaataaagcattcaatgataattttgttaaccaagagaaaacattattagccaaaaaaatagaagcaatggtagataataaagcacaatattcgtttttaaaattactcgaccatatgtttgaaaatgaagcatataaatacttatctacaggacaactagaacaaatcccacatattactgctgaaacactatatcatacatatcaatcaatgattaataatgatcaatgttctgtttatgttgtcggcaatgtagaacctgaaagtgttgagaaacaaatacgtgaaaaatttgcacttaaaccattcgataaacatcaattccaacattctactcatcatttacacgatgaagaagttgattatattgttgaatatgatgacgtggatcaagctaaattaaatatgggataccgttttccaacacaatatggacaaagtggatatgctgcctttgttgtatttaacatgatgtttggaggagatccttcatctgttttatttaatgaagtgcgagaaaagcaaagtttagcgtactctatacattcacaaattgatggcaaaaatggctatttatttgttttgagtggggtttcaagtgataagtacgaaactgcaaaagacactattataagtgaatttgaaaaaataaaagcaggagatttcactgaagaaaaattagagttagctaaaaaagtaatcatttctcatcgatatgaatctgaagatcgtccgaaaagtattatagagattatgcataaccaaatattattagagcaaccacaaagcaaagaaacatttataaatgatatacagaaggtaagtcgcgaagatattgtttctgttgctgaaaaagcatttttagatacaatctatgtgttgacaaaaggaggggataaataatgaaagagcgttattatgaattaatagacgaaagagtattcgaacaagaattagaaaatggtttacgattatttattatccccaaaccaggttttcaaaagacatttgtcacttacactacacaatttggttcattagataatcaattcaaaccccttggacaagaccaatttgttactgtacctgatggagttgctcactttttagaacataaattatttgaaaaagaagaagaagacttatttactgcgtttgctgaagataacgcacaagcaaatgcgtttacaagctttgatcgtacaagctacttgttcagtgcaactgataatattgaaaacaacattaaacgtttacttacaatggttgaaacgccttattttacaaaagaaactgttgataaagaaaaaggtattattgcagaagaaataaaaatgtatcaagagcaacctggatataaattaatgtttgatacattgcgtgcaatgtatcaacaacatccaatacgtgttgatattgccggtagtgtagaaagtatatacgatattacaaaagatgatttgtatctatgttatgaaacgttttatcatccatcaaatatggttttatttgttgttggcgatgtggatcctgaagcaatatgtcgaatagtaaaacaacacgaggatgctcgtaataaagttaaccaacccaaaatcgaacgaggacttgttgatgaaccggaggatgttaaagaagcatttgttactgaatctatgaaaattcaatcaccaagactaatgcttggttttaaaaataaaccattacaagaagcgcctcaaaaatatgtacaacgtgatttagaaatgtcattattctttgagttaatttttggggaagaaacagatttttatcagaatttattaaacgaaggacttatcgatgatacatttggttatcaatttgtactagagccgacgtatagtttttcaatcgtgacaagtgctactgaagaaccagataaattaaaaaaattattattagatgagttgcgtgataaaaaaggcaatttccaagatgcagaagcatttgaacttttgaaaaagcaatttataggtgaattcatatcaagtttaaactcacctgaatatattgctaatcaatatactaaattgtattttgaaggtgttagcgtgtttgacatgttagacattgttgaaaatatcacgttagatagtattaacgaaacgtcatcgttatatttaaatttagatcagcaagtcgatagtcgtttggagattaaaaagtaatgaaagcattagtattaggtggttctggttcaattggttctgagatagtcaaacaattattaactgatggatttgaagtttatgtgcaatattatcgtactgatataaatgaattaactagcaaatttaatgatgataaagttcgttttatacaagcggatttatctcaaacaattgatattgacaaaacatttggtgacattaaatcattagactgtttaatatatgcaagtggtcagtctttatatggtgttttacaagatatgaaagaccatgatattgatgcatgttatcagttaaatgtcttgcaattaattcgattatgtagatatttcgttgatgttttacgtcaaagtgccaatggaagaattattgtaatttcatcaatttggggtgagacaggagctagtatggaaactatttattcggcgatgaaaagtgcacaattaggtttcgttaaggcgcttagtcaagagcttgcactaacatcagtgacagtaaatgctatcgcacctggatttgtagccggtaatatggcaagtgagtggcaagaagatgaacttcaagcaatgataactgaattaccacaacagcgattggttttaccgagtgaggttgctcatacatgcgcctatttatatcacccaaatgctagaagtgttactggaactatacagaaagttaatggtgcttggtatatttaaaatatagaactatttttatgagcaaatgtttttatgattgatgttataatatgaatattacaatgaatcataatttgttaattaaacaaggggtgaggttcaccatgacagttgcagagaaaaaagaatggtacctagaatacgaaattgaaattaatagaccgggtcttttaggtgatgtatctagtttattaggtatgttaggtataagtattgttacaattaatggtgttgatcaaggtaaacgaggccttttaattaaaacagacaatcttgaaaaagttgaacgttttgagcaaatagctcgtggtataaatgaaattgaaataacaaagcttaaaaaaccagaattaagagaccgtcttgcagtaagacatggaagatatattgagcaagatgcaaaagataagaaaacctttcgatttgagcgtgaagatttaggcttgttagtagactttttagctgaattgttcaaagaagaaggtcataagttgattggcattagaggtatgccacgggttggtaaaactgaatcaattgttgcgggaagtgtttgtgcacataagagatggttatttattagttctactttaataaaacaaactgtacgtagctctctaattaaaggggaatatgatgccaatcatgtatacattattgatggtgcagttactgccagagaatctaatccaaaacatcaagagcttgttaacgaagttatgacgttaccatcaatcaaagtcgttgaacatccagatttatttgttgaaacaagtacttgtacaatggaagattttgactatattatcgaattgagagaaaatgaaaatcaagaaatacattacgaagaaatgaagaaacagacagtccaaagtaagaataatttagattttggagatccgtttggtggtggttttggtttcttcgagtaagtgtaaggaggctatgaattgaaaacggtcggtgaagcgctaaaaggtagacgtgaaaggttaggaatgactttaacagaattagagcaacgtactggaattaaacgtgaaatgctagtgcatattgaaaataatgaattcgatcaactaccgaataaaaattacagcgaaggatttattagaaaatatgcaagcgtagtaaatattgaacctaaccaattaattcaagctcatcaagatgaaattccatcgaaccaagccgaatgggacgaagtaattacagttttcaataataataaagacttagattataagagtaaatcaaaagagccaatacaattattagtaatcatgggtattacagttttaataactttattgttatggatcatgttagttttaatattttaacagaaataaattagtgagaaatgaggatgtataatgaatattccgaaccagattacggtttttagagtagtgttaataccagtttttatattgtttgcgttagttgattttggatttggcaatgtgtcatttctaggaggatatgaaataagaattgagttattaatcagtggttttatttttatattggcttcccttagcgattttgttgatggttatttagctagaaaatggaatttagttacaaatatggggaaatttttggatccattagcggataaattattagttgcaagtgctttaattgtacttgtgcaactaggactaacaaattctgtagtagcaatcattattattgccagagaatttgccgtaactggtttacgtttactacaaattgaacaaggattcgtaagtgcagctggtcaattaggtaaaattaaaacagcagttactatggtagcaattacttggttgttattaggtgatccattggcaacattgattggtttgtcattaggacaaattttattatacattggcgttatttttactatcttatctggtattgaatacttttataaaggtagagatgtttttaaacaaaaataaatatttgtttatactagatttcattttcatatggaatctagtttttttaatcccaattttagaaattagccacgcaattgtttataatgatatattgtaaaacaatatttgttcatttttttagggaaaatctgtagtagcatctgatacattgaatctaaaattgatgtgaatttttaaatgaaatacatgaaaaaatgaattaaacgatacaagggggatataaatgtcaattgccattattgctgtaggctcagaactattgctaggtcaaatcgctaataccaacggacaatttctatctaaagtatttaatgaaattggacaaaatgtattagaacataaagttattggagataataaaaaacgtttagaatcaagtgtacgtcatgcgctagaaaaatatgatactgttattttaacaggtggcttaggtcctacgaaagatgacttaacgaagcatacagtggcccagattgttggtaaagatttagttattgatgagccttctttaaaatatattgaaagctattttgaggaacaaggacaagaaatgacacctaataataaacaacaggctttagtaattgaaggttcaactgtattaacaaatcatcatggcatggctccaggaatgatggtgaattttgaaaacaaacaaattattttattaccaggtccaccgaaagaaatgcaaccaatggtgaaaaatgaattgttgtcacattttataaaccataatcgaattatacattctgaactattaagatttgcgggaataggtgaatctaaagtagaaacaatattaatagatcttatcgataaacagactaatcctacgattgcgcctttggcgggaagtcatgaagtatatattagattgactgcaaatgccgactcaaaagaacaagcacaatcattgattcaacctgttaaacaagaaattcttgatcgtattggagaatattattatggttcagatgacacattaattgagcaagctgtaataaagaaaattcatgaaccttttgtaatatatgatggtattactaatggtgctttatatcatcgattgaaagaagtggatttaaacgatgttctaaagggtatgattaatcacaatgaaaactttgttgatattaataaacctattgagcagcaattaaaagatgcagtgcaatttgttaataaattgtttaatgtgtcatcagcaattattctattagagtatgatggtgtagttcatataggctatgataataactttgaatttaaaactgagcaatttaaaatgtctaaatctagaaatttattaaagaacagaagtcaaaattatgcgctcataagattattaaattggcttagaacaacaaattaattgtattatcgataaaaatataagcacgtttgttcgtttttgcgttttgatttcaagattttatacgaacaaatattcgcaaaacacttgtattttattttgaatccttgtatagtattggtaagataattaaaagatagcaatttcaattaggaggtctcgctttggataacgatcgtcaaaaagctttagatacagtaattaaaaatatggagaaatctttcggtaaaggtgccgtaatgaagttgggtgacaatataggtcgccgagtttcaactacatcaactggttcagttacattagataatgcgctaggtgtaggtggctatcctaaaggacgaattattgaaatttatggtcctgaaagttctggtaagacaacagtagcgcttcacgctattgctgaagtacaaagtaatggcggggtggcagcatttatcgatgctgaacatgctttagatccagaatatgctcaagcattaggcgtagatatcgataatttatatttatcgcaaccggatcatggtgaacaaggtcttgaaatcgccgaagcatttgttagaagtggtgcagttgatattgtagttgtagactcagttgctgctttaacacctaaagctgaaattgaaggagaaatgggagacactcacgttggtttacaagctcgtttaatgtcacaagcgttacgtaaactttcaggtgctatttctaaatcaaatacaactgctattttcatcaaccaaattcgtgaaaaagttggtgttatgttcggtaatccagagactacaccaggtggacgtgcattaaaattctatagttcagtaagactagaagtacgtcgtgcagaacagcttaaacaaggacaagaaattgtaggtaatagaactaaaattaaagtcgttaaaaataaagtggcaccaccatttagagtagctgaagttgatattatgtatggacaaggtatttctaaagagggtgaacttattgatttaggtgttgaaaacgacatcgttgataaatcaggagcatggtattcttacaatggcgaacgaatgggtcaaggtaaggaaaatgttaaaatgtacttgaaagaaaatccacaaattaaagaagaaattgatcgtaaattgagagaaaaattaggtatatctgatggtgatgttgaagaaacagaagatgcaccaaagtcattatttgacgaagaatagtacacaaatttatatctatagttaaacttagcaaatatccttataggattgattgaaagtgatattcatctcataaagctagaataatatctaactttatgggatacactacaaatcgagactataaggttttttattttatttattattacattatcaatagttttataatcgagcttcaaaactttagaaaatagtagaaatagcattcaatatagtgcaaaagtgcaaattgataacttgacacttatctcctataaaccgtacaattaatttgtatgatttatatataatttcataaagtcatattgaatttcatataaagagcaaaccctagaaaaggaggtgtttgtgtgaatttattaagcctcctactcattttgctggggatcattctaggagttgttggagggtatgttgttgcccgaaatttgttgcttcaaaagcaatcacaagctagacaaactgccgaagatattgtaaatcaagcacataaagaagctgacaatatcaaaaaagagaaattacttgaggcaaaagaagaaaaccaaatcctaagagaacaaactgaagcagaactacgagaaagacgtagcgaacttcaaagacaagaaacccgacttcttcaaaaagaagaaaacttagagcgcaaatctgatctattagataaaaaagatgagattttagagcaaaaagaatcaaaaattgaagaaaaacaacaacaagtagatgcaaaagagagtagtgttcaaacgttaataatgaagcatgaacaagaattagaacgcatctccggtctcactcaagaagaagctattaatgagcaacttcaaagagtagaggaagaactgtcacaagatattgcagtacttgttaaagaaaaagaaaaagaagctaaagaaaaagttgataaaacagcaaaagaattattagctacagcagtacaaagattagcagcagatcacacaagtgaatcaacggtatcagtagttaacttacctaatgatgagatgaaaggtcgaatcattggacgagaaggacgaaacatccgcacacttgaaactttaactggcattgatttaattattgatgacacaccagaagcggttatattatctggttttgatccaataagaagagaaattgctagaacagcacttgttaacttagtatctgatggacgtattcatccaggtagaattgaagatatggtcgaaaaagctagaaaagaagtagacgatattattagagaagcaggtgaacaagctacatttgaagtgaacgcacataatatgcatcctgacttagtaaaaattgtagggcgtttaaactatcgtacgagttacggtcaaaatgtacttaaacattcaattgaagttgcgcatcttgctagtatgttagctgctgagctaggcgaagatgagacattagcgaaacgagctggacttttacatgatgttggtaaagcaattgatcatgaagtagaaggtagtcatgttgaaatcggtgtagaattagcgaaaaaatatggtgaaaatgaaacagttattaatgcaatccattctcatcatggtgatgttgaacctacatctattatatctatccttgttgctgctgcagatgcattgtctgcggctcgtccaggtgcaagaaaagaaacattagagaattatattcgtcgattagaacgtttagaaacgttatcagaaagttatgatggtgtagaaaaagcatttgcgattcaggcaggtagagaaatccgagtgattgtatctcctgaagaaattgatgatttaaaatcttatcgattggctagagatattaaaaatcagattgaagatgaattacaatatcctggtcatatcaaggtgacagttgttcgagagactagagcagtagaatatgcgaaataatttttgtctccctcacaaattagtgagggagcttttttaagttgtagtcttaatctagttagacagcactttatcggtaataactatattaaacagtagttatttgaaagtaagacggaccttatattaaataagaagttattgcttttaataaaaatgttttaggcttcgtaattactatatttatattatgtaaacctataaagatgattgcttttctatccaataaaaaagaagagaagatgtaacacatcttctcttctgcaatattaattaggatttatttctaagttgagttattttaattgtaaatctgttttctttaattcttttataacttctgcagtatcataacaatttgttgcaattgttgaatatctctctgctaaacgatatgcattaatgtaaagctttaaactttctttagctatatcctctgcatcttcgaattttgatgggttagacataaccactaattctgcaaatttttctggatcaatattaatagacatgtatttatttacaactcctatttattttgatgtcttaatactaacatattgaagttttcagacaaagtaatgtctctctataattgaagaaaaataattcaaagaatttaatatttactttaaatattagaacgtatgaattaaactagtatttatgagaggatgaacaaaacatgagaataatgtttataggggatatcgtaggtaaaattggacgagacgcaattgaaacgtacatacctcaactgaagcaaaagtataaaccaacagttacaattgtaaatgctgaaaatgcagcacatggtaaaggtttgactgaaaaaatatataaacaattactaagaaatggtgtagatttcatgactatgggtaatcacacatatggtcaacgtgaaatttatgattttatagatgaagcaaaacgactagtaagaccagcgaattttccggatgaagcgccgggaattggtatgagatttatacaaattaatgatattaaacttgcagttattaatctgcaaggaagagcgtttatgccagatattgatgatccttttaaaaaggcagatcaattagtcaaggaagcacaagaacaaactccgtttatatttgttgattttcatgcagaaacaacttctgaaaagtatgcaatgggatggcatttagatggtagagctagcgctgttgttggaacgcatacacacattcaaacagcagatgaacgtattttaccaaaggggacagggtatataacggatgttggtatgacaggtttttatgatggcattttaggaataaataaaacagaggtaattgagcgttttatcactagtttgccacaaagacatgttgttccaaatgaaggtagaagtgtattatctggtgttgttattgatttagacaaagaaggtaaaacaaagcacatcgaacgtatattgataaatgatgaccatccattttcaacattttaaaattacgtaagtaaacattcgaattggaccctatcgtccattagtatgaatttaatatagtaccactgtttacatagtaaatcggtggttctttttgttatcatttaatatgaaatatatccataggaggcatataactatgaaaccacaattatcgtggaaagttggcggtcaacaaggcgaaggtattgaatcaactggggaaatcttcgctacggctatgaatagaaaaggatattatttatatggatatagacatttttcaagtcgtatcaaaggtggacatacgaataataaaattagagtttctacgacgcctgttcatgcaattagtgatgatttagatattttgattgcatttgaccaagaaacaattgatgttaaccatcatgaaatgagagaagacagtattattttagctgatgccaaggctaaacctgtgaaaccagaaggatgtcatgcacagcttattgaattaccttttacagcaaccgctaaagaattaggtacagcattaatgaaaaacatggttgcaataggtgctactagcgcattgatgaatttgaatacaaatacatttgaagaacttattactaatatgttttctaaaaaaggtgacaaggtagttgaagtcaatatccaagcattaaacgaaggttatcaattaatgcaatctcgcttacctgaaatctacggggactttgaattagagtcaacagatgcactaccacatctatatatgattggtaacgatgccattggattaggtgcaattgctgcaggttcacaatttatggcggcatatcctattacacctgcgtctgaagttatggaatatatgattgccaatatatctaaagtaaacggagcggttattcaaacagaagatgaaattgctgctgtaactatggctattggtgcaaattatggtggagtcagagcgtttacggctagtgctggtccaggtttatctttaatgatggaagcaattggattatctggtatgactgaaacgccattagtcattattaatacccaacgaggtggaccttctactggattacctacgaaacaagaacagtcagatttaatgcaaatgatttatggtacacatggtgatattccaaaaattgttgtagcaccaacagatgcagaagatgcattttatttaactatggaagcatttaatttagcagaacaatatcaatgccctgttatagttctaagtgatttgcaattatctttaggtaaacaaactgttgaaaaattagattataatcgtattgaaattaaacgtggtgaaatcattcaatctgatattgaacgtgaagaagatgataaaggttatttcaagcgttatgcgttaacatccgatggtgtttctcctagacctatccccggtgttaaaggaggtattcatcatataactggtgtggaacacaatgaagaaggtaaacctagtgaatctgcgtcaaatagacaacaacaaatggaaaaacgaatgcgtaaaattgagcagttactaattgaatcgccagtagaagctaacttacaacatgaggatgcagatattctttatatcggttttatttctacaaaaggtgcaattcaagaaggtagtaaccgtttgaatcaacaaggcataaaagttaacactatacaaattagacaattgcatccattcccaacaagcgttattcaagatgcagttaataaagcgaagaaagtcgttgtagtggagcacaattatcaaggacaattggctagtattataaaaatgaatgtcaatattcatgataagattgaaaattatacaaagtatgatgggacacctttcctaccacatgaaatcgaagaaaaaggcaaaataattgctactgaaataaaggagatggtatagatggcgacatttaaagattttagaaataatgttaagcctaactggtgccccggatgtggcgatttctcagtacaagctgcaattcaaaaagcagccgcaaatatagggttagaacctgaagaagtagctatcatcaccggtataggatgttctggccgtctttcaggatatattaattcttatggcgttcattctattcacggacgtgcattacctttagctcaaggtgtaaaaatggcgaataaagatttaactgttattgcatcgggaggagatggtgatggttatgctataggtatggggcatacaatccatgctttaagaagaaatatgaacatgacgtatatagtcatggataatcaaatttatggtttgacaaagggacaaacatcgccgtcatcagcagtaggatttgttactaaaacaacgccaaaaggtaatatagaaaaaaatgttgcgcctttagaattagcattatcatctggtgccacatttgtagcccaaggtttttcaagcgatattaaaggattaacaaaactaattgaagatgcaattaatcatgatggattttcattcgttaatgtcttttcaccatgtgtgacttataataaaattaacacatacgattggtttaaagaacatttaacaagtgttgatgacattgaaaattatgattctacagataaacaattagcgactaaaactgttattgaacatgaatctttagtaactggtattgtttatcaagataaagaaacaccatcatatgaatctcaaattaaagagttagatgatacaccacttgctaaaagagatatcaaaattactgaagacaccttcaatgcattaactgaacaatttatttaataattaaaactgagtcgtataaatgtatttataacagatccatttatgctactcagttttttactattacaaaaaataaaggagtttttaaaaatgaaagacacattaatgagtatacaaataattcctaaaacaccaaacaatgacaatgttataccttacgtagacgaggcgattaaaataattgacgaatctggtttgcattttagagtaggtccgttagaaacgacagtacaaggaaatatgaatgaatgtttaattttaatacaatcattaaatgaacgaatggtggaacttgaatgtccaagtattattagccaagttaagttttatcatgtgccagatggcatcactattgaaactttaactgaaaaatatgatgaataacattaaaagtgaagtaaactggatttgaattggcttgttagagatgacgtataactttaactgtttttgcactttatagttaaatttaatataattattaaatgatacgggcaaatagaaaggattttgtaaagtgaacgaagaacaaagaaaagcaagttctgtagatgttttagctgagagagataagaaagcagaaaaagattatagtaaatattttgaacatgtttatcagccgcctaatttaaaagaagcgaaaaaaagaggtaaacaagaagttcgttataatagagatttccaaattgatgaaaaatatcgcggtatggggaacgagcgtacatttttaattaaaacatatggatgtcaaatgaatgcacatgacactgaggtcattgctggtatacttgaagcattaggctatcaagcaacgactgatattaacactgcagatgttattttaattaatacatgtgcgattagagaaaatgccgagaacaaagtgtttagtgaaataggtaatttgaagcatttgaaaaaagaacgacctgatattttaatcggtgtttgtggttgtatgtcacaagaagagtcagtagtgaataaaattttaaaatcgtatcaaaatgtagatatgatatttggtacacataatattcatcatttaccagaaattttagaagaagcatacttatctaaagcaatggttgttgaagtatggtctaaagaaggagacgttattgaaaatcttccaaaagtccgtgaaggcaacattaaagcatgggtcaatattatgtatggttgtgataagttttgtacatattgtattgttccatttacaagaggtaaagaacgaagccgtagacctgaagacattatagatgaagtacgtgaacttgctcgtgaaggttacaaagaaataacgcttttaggtcaaaatgtaaattcttatggtaaagatttacaggatatagaatatgacttaggagatcttttacaagcaatttctaaaatagcgattccaagagttcgtttcacaacaagtcatccttgggactttacagatcacatgattgatgttatttcagagggtggtaatatcgttccgcatatccacttgccagttcaatctggaaataatgcagtattaaaaataatgggtagaaaatatacacgagaaagttatttggatttagtaaaacgaatcaaagatagaattcctaatgtagcattaactacagatattattgtagggtatccaaatgaatcagaggaacaatttgaagaaactttaactctgtatgatgaagttggttttgaacatgcatatacgtacttgtattcacaacgtgatggtacgcctgctgctaaaatgaaagataatgtacctttaaatgtcaaaaaggaacgattgcaacgtttgaataaaaaagttggtcattattcacaaatagctatgagtaagtacgaaggacaaactgtaacagtactttgtgaaggaagtagtaaaaaagatgatcaggttcttgctggctacactgataaaaataagctagttaatttcaaagcgcctaaagaaatgattggtaaactagtggaagtacgaatagatgaagctaaacagtattcattaaatggcagttttataaaggaagtagagccggaaatggtgattcaataaatgtataataaagatgacgtgttgaaccaagcggataatattgcaaataaaattaaaaatttggatactatcaaaacatatcaacaaattgaagcacagattcatcagaaccaaacgataaagactaaaatggatatgttaaaaaagcatcaaaaacaagcagtaaactttcaaaattacgggaaacaaaatgcgctagaacagtcggaacataccattcagagtatagaagcagaaataaatacattgcccatagttgaacagtttcaaacttcacaatatgaagcgaatcaattattgaaaatgtttgtatcaacaatggaaacacgtttaaatgaccataataaagccaagcatagtgattaattacaaacaaaaaggagaacaatcatatgaaatcaagaaaactggctataactgcacttttaattgcaataaatgttgtattaagcagtattatcatcattcctctaggaccagttaaggcagcaccagtacagcattttgtaaatgtattaagtgcggtcatagtaggtccttggtatggattagctcaagcgcttatatcatcaattttaagagttctttttggtactggtacagcttttgcatttccgggtagtatgattggagttttattggctagtatgttttacatatatcgtaaacatatatttatggccgcggtcggtgaagtacttggaactggtgtcatcggaagtttaatttgtataccattagcatatttccttgggcttcaagacttcttcattaaaccgttaatgattacgttcatagtctcaagtgctatcggatctattataagttatttcttattaattactctaaaaaaacgtggtattcttcaaaggtttataaaataattttatgatatatgatttcaaacagagtcattgttcattttaatattgaacgcccttacttaattaaatgtcttgaatgttagaattttaatttaattctaaacatgctattgacacattttattaggtttgaggcgttttcttatacatttaagatgcttcgtgattatatggtatgaataggtttgtaaaagtaagtatgttaaaatgtataagttaaataattaataattaaaaagcttacaaacgaatatattgtaaagacaaattttaaaaagagacaagggttgtgaagaaataatatgtctaatgttacaccaatgatgcagcaatatttaaaaataaaatcagaataccaagattgcttattattttttagactaggtgatttctatgaaatgttttatgaagatgccaaggaggcatcacgtgtacttgaaattactttaactaaaagagatgctaaaaaagaaaatccaattccgatgtgtggtgttccgtatcattctgcagatagttatatagatacacttgttaataatggatataaagtagctatttgtgaacagatggaagatccgaaacaaacgaaaggtatggttagacgtgaggtagtaagaattgtgactccaggaactgtgatggagcaaggtggtgtagatgataaacaaaataactatattttaagttttgttatgaatcaacctgaaattgcgcttagttactgtgatgtttctactggcgaattaaaggttacacattttaatgatgaagcgactttattaaatgaaattacgacgataaaccctaacgaagttgttatcaatgacaatatttccgataatttaaaaagacaaattaatatggtgacagaaacaataacagtcagggaaacgttatcatcagaaatctatagtgtgaatcaaactgaacataaattaatgtatcaagcgacacaattattgctagattatattcatcatacacaaaaacgtgatttatcgcatatcgaggatgttgttcaatatgcagctatagattatatgaaaatggatttttatgctaagagaaaccttgagttaacggaaagcattcgattaaaatcaaaaaaaggaacgctactttggctaatggacgaaacgaaaacaccaatgggagcacgccgcttaaaacaatggatagatagaccactaataagtaaagaacaaattgaagcacgattagatatcgttgatgaatttagtgctcatttcatagaaagagacaccttaagaacatatcttaatcaagtgtatgatattgaacgtcttgttgggcgtgttagttacggaaatgttaatgcgagagatttaattcaacttaaacattccatttctgaaataccgaatattaaagcattactaaattctatgaatcagaatactcttgtacaagttaatcaactagaaccccttgatgatttacttgatatattagaacagagtttagtagaagaaccaccaatttcagttaaagatggcggactattcaaagttggttttaatacgcaattagatgaatatcttgaagcttcaaaaaacggaaaaacatggttagcagaattacaagccaaagaaagacaacgtacaggaataaaatcattgaaaataagctttaataaagtgtttggttattttatagaaataacacgtgccaacttgcaaaattttgaaccaagtgaatttggttatatgaggaagcaaacgttatcgaatgctgaacgttttataactgatgaacttaaagaaaaagaagatatcattttaggtgcggaagacaaagccatcgaattagaatatcaattatttgttcagctacgtgaagaagttaaaaaatatactgaacgtttacaacaacaagctaaaattatttcagagctagattgtttacagagctttgcagaaattgctcaaaaatataattacactaggccttcatttagtgaaaataaaacattagaattagtggaatctaggcacccagtagtggaaagagtaatggattataatgactatgtgcctaataattgtcgattagataatgaaacatttatatatttaattacaggtccgaatatgtctggtaaatcgacatatatgagacaagttgccataattagtataatggcccaaatgggagcttatgtcccttgtaaagaggcagtgttacctatatttgatcaaatattcactagaataggtgcggcagatgatttggtttcaggtaagagtacgtttatggtagaaatgctagaagcacaaaaggcattaacttatgcaacagaggatagtttgattattttcgatgaaattggacgtggtacttcaacgtatgacggtttagctttagcgcaggcaatgatagagtatgtagctgaaacatcacatgctaaaacgttattttcaacacattatcatgaattgacaacattagatcaagcattaccaagtctaaaaaatgttcacgtcgctgctaatgaatataaaggtgaacttatattcttgcataaagtcaaagatggtgcagttgacgatagttatggtattcaagttgcgaaattagctgatttacctgaaaaagttattagcagagcacaagtgattctaagcgagtttgaagcgtctgctggtaaaaaatcatcgatatcaaatttaaaaatggtcgaaaatgaacctgaaattaatcaagaaaatttaaacttaagtgttgaagaaacaactgatactttatctcaaaaagactttgaacaagcatcatttgatttgtttgaaaatgatcaagaaagcgagattgaactacaaattaaaaatttgaatttatctaatatgacaccaattgaggcattggtgaagttaagtgaattacaaaatcaattaaaatagaggtgttgcaaaatggggaaaattaaagaactccaaacctcattagcaaataaaatcgcagcaggtgaagtagttgaaagaccgagttctgttgtgaaagaactgttggaaaatgctatagatgcaggcgctacagaaataagcattgaagtagaggaatctggcgtccaatctattcgcgtagtcgataatggaagcggaattgaagcggaagacttaggattagtatttcatagacatgcgactagtaaattagatcaagatgaagatttatttcatattaggacattaggattccgtggtgaagcactagccagtatttcatcagttgctaaagtaacattgaagacttgcacggataatgctaatggaaatgaaatatatgtagaaaatggtgaaatattaaatcataagcctgcaaaagcgaaaaaaggaacagatatacttgtagaatcattattttataatacaccagcacgtttaaaatatattaaaagtttatacactgaactaggtaaaataacagatattgtcaacagaatggcaatgagccatccggacattcgaatagcactcatttcagatggcaaaacaatgttaagtacaaatggttcaggacgaactaatgaagtgatggcagagatttatgggatgaaagttgcacgagatttagtacatatatctggagatacaagtgattatcacattgaaggttttgttgcaaagcctgaacattctagaagtaataagcactatatttctatttttattaatggacgatacattaaaaactttatgctaaataaagcgattttagaaggctatcatacactcttaacaataggtaggttcccgatttgttatattaatattgaaatggatccaatcttagtagacgtaaatgttcatccaacaaaactagaagtgcgtttatcaaaagaagagcaactataccaattgattgtgagcaaaatacaagaagcatttaaagaccgtatattaattcctaaaaataacttggattatgtgccaaaaaaaaataaagtattacattcattcgaacaacaaaaaatcgaatttgaacaaagacaaaacacagagaataaccaagagaagacgttttcatctgaagaaagtaacagtaagccatttatggaagaaaatcaaaacgatgagatagttataaaagaagattcatataatccattcgtaacgaaaacatctgaaagtttaatagctgatgatgaatcttctggttataataatacacgtgaaaaagatgaagactacttcaaaaaacaacaagaaattttacaagaaatggatcaaacatttgattcaaatgatggtacaactgtgcaaaattatgagaataaagcgtctgatgattattatgatgtaaacgatattaaaggaacaaaaagtaaagaccctaaacgaagaattccatatatggaaattgttggacaagtacatggaacgtatattattgctcaaaatgaatttggcatgtacatgattgaccagcatgcagctcaagaaagaataaaatatgaatattttcgagataaaataggtgaggttaccaatgaagtacaagatttattaatcccgttaacatttcatttttcaaaagatgaacaattagtcattgatcaatataaaaatgagcttcaacaagtaggtatcatgttagaacattttggtggtcatgattatattgtaagtagctatccagtttggttccctaaagatgaagtagaagaaattattaaagatatgattgagctaattttggaagagaaaaaagtagatatcaaaaaattacgtgaagatgtagcaatcatgatgtcatgtaaaaaatccattaaagcgaatcattatttacaaaaacatgaaatgtctgatttaattgatcaattaagagaagcggaagatccatttacatgtccacatggtcgtccaataatcattaatttttcaaaatacgaattagaaaaattatttaagcgtgtgatgtagagaggatgaatcaagtgaataacaacatattgcctgctataagaaacattaaagatttagagaaactgattaaaacagactataaaatgtgtgtgcttctagatatgcatataggacatataaaaagtattatggaattgctgaagcaaaatcatatagagtgttttattcatatagatttgataaaaggtttaagccacgatgaatttgcaagtgaatttattattcagcaatacaagccaaaaggtatcgtatcgactaaatctaaagtaataaaaaaagctaaatcattaaatactttaacgatttttagagtatttattattgatagtcaagcattgaaacgcagtatagatttgataaaaaaagttgaacctgattttgttgaagtacttccaggtgttgcgagtaaagcgattcatcatattcagaaagaaacaaacacacaagtcattgcaggtggcctaattaatacaatagatgaagtcaatgaagctgttaaaaatggagcgaaatatgtaactactagttatgataaactttggtaaatcataagtctgcaaaaatttcatttttcacgagatttagtcatataacataataaaaaagccgttttcatatgggatatgcagtaggtatcaaacaaaaaataatcaaataaaataattagcacctctaaaacgattaaaatcattaaagttttagaggtgtttattagtaaaaaatgcaactagtcataaaaaatatggctgaagaatgtcaattaaacaaaagagcgtcataaataaattagttaggattggtatttctagttttcaaattaaactacttttataaagacttgaaaaattaaatttgacaaaatttttacaaaaaccattgacaacgctttcatatcgatagtatcataacaaatataataaaagttaatacatagaatagagacgggagatttctacgagccaaactgctagtgtaggaatctctttgtctttttgggaggacatttaatatgaatgtatatttagcagaattcctaggaactgcaatcttaatcctttttggtggtggcgtttgtgccaatgtcaatttaaagagaagtgctgcgaatggtgctgattggattgtcatcacagctggatggggattagcggttacaatgggtgtgtttgctgtcggtcaattctcaggtgcacatttaaacccagcggtgtctttagctcttgcattagacggaagttttgattggtcattagttcctggttatattgttgctcaaatgttaggtgcaattgtcggagcaacaattgtatggttaatgtacttgccacattggaaagcgacagaagaagctggcgcgaaattaggtgttttctctacagcaccggctattaagaattactttgccaactttttaagtgagattatcggaacaatggcattaactttaggtattttatttatcggtgtaaacaaaattgccgatggtttaaatcctttaattgtcggagcattaattgttgcaatcggattaagtttaggcggtgctactggttatgcaatcaacccagcacgtgatttaggtccgagaattgcacatgcgattttaccaatagctggtaaaggtggttcaaattggtcatatgcaatcgttcctatcttaggaccaattgccggtggtttattaggtgcagtggtatacgctgtattttataaacatacatttaatattggttgtgcaattgcaattgttgtagttattattactttgattttaggttacattttaaataaatcatcaaaaaaaggtgatatcgaatcaatttactaaaataaaaagaaacgtaaatagcataatttaacatgtttgattcatggattatgctattttttcgccaaaatttaacagattttgtacaatgggttagcgattattttttaataaaggagatactactaatggaaaaatatattttatctatagaccaaggaacaacaagctcaagagcgattttattcaatcaaaaaggggaaattgcaggggtagcacaacgtgagtttaagcaatattttccacaatcaggttgggttgaacatgatgcaaatgaaatttggacatctgtgttagctgtaatgacggaagtaattaatgaaaatgatgttagagctgatcaaattgcaggtatcggtattacaaaccaacgtgaaacaacggttgtttgggacaaacatactggccgcccaatttatcacgcaattgtttggcaatcacgtcaaacacaatcaatttgttcagaattaaaacaacaaggatatgaacaaacatttagagataagacaggattacttttagatccgtattttgcaggtacaaaagttaaatggattctagacaatgttgaaggtgcacgagaaaaagcagaaaatggcgatctattatttggaacgattgatacttggttagtatggaaattatcaggaaaagctgcgcatattactgattattcaaatgcgagtcgtacattaatgtttaatatccatgatttagaatgggacgatgagttattagaactacttacagtacctaaaaatatgttgccagaagttaaagcttcgagtgaagtatatggtaagacaattgattaccacttctatggtcaagaagtaccaatcgctggagtagctggtgatcaacaagcagcattatttggacaagcttgcttcgaacgtggtgacgtgaaaaacacatatggaactggtggcttcatgttaatgaatacaggtgacaaagcggttaaatctgaaagtggtttattaacaacaattgcttatggtattgatggaaaagtaaattatgcgcttgaaggttccatctttgtttcgggttcagcaatccaatggttacgtgatggattaagaatgattaattcagcaccacaatcagaaagttatgcgacacgagttgactctactgagggtgtttatgttgttccagcttttgtaggtttaggaacaccatattgggattctgaagcacgtggtgcgattttcggtttaacacgtggaactgaaaaagagcactttatccgtgcaactttagaatcactatgttaccaaactcgtgacgttatggaagcaatgtcaaaagactctggtattgatgtccaaagtttacgtgtcgatggtggtgcagttaaaaataactttattatgcagttccaagcagacattgttaatacttctgttgaaagacctgaaattcaagaaactacagctttaggtgctgcatttttagcaggtttagcagttggattctgggagagtaaagatgatatcgctaaaaactggaaattagaagaaaaattcgatccgaaaatggatgaaggcgaaagagaaaaattatatagaggttggaaaaaagctgttgaagcaacacaagtttttaaaacagaataaacttgtagattagacttttgtataaacattgtgatacaatcaatttaagttaatatttgaatcgagaagcgagagatttgttcgaacatgtacaattgaaggattgtttatgtgggacaagtctctcgtttttacattttttaggaggcgttttggaatggcattgtctacttttaagagagaacatattaaaaagaatttaagaaatgatgaatatgatttagtaattattggtggcggtattacaggtgcaggtattgcactagacgcgagtgaaagaggaatgaaagttgcattagttgaaatgcaagactttgcacaaggaacaagctcaagatctacaaaattagtccatggtggtttgcgttacttaaaacaattccaaattggagtagttgccgaaactggtaaagaacgtgcgattgtttatgaaaatgggcctcatgttacgactccagagtggatgcttttaccaatgcataaaggtggaacatttggtaaattctcaacatcaattggtttaggaatgtatgatcgtttagcaggtgttaagaagtctgaacgtaaaaaaatgttatctaaaaaagaaactttagctaaagaaccattagttaaaaaagaaggtctaaaaggcggcggttactatgttgaatatcgtactgacgatgcgcgtttaactattgaagttatgaagcgtgctgctgaaaaaggcgcagaaattatcaactatactaaatctgaacacttcacttatgataaaaatcaacaagtaaatggtgttaaagttatagataaattaactaatgaaaattatacaattaaggctaaaaaagtggttaatgcagcaggtccatgggttgatgatgttagaagtggtgattatgcacgcaataataaaaaattacgtttaactaaaggtgtacatgttgttattgatcaatcaaaattcccattaggtcaagcagtatactttgatactgaaaaagatggaagaatgatttttgcaattccacgtgaaggaaaagcgtatgtaggtactacagatacattctatgacaatatcaaatcttcaccattaactacacaagaagacagagactatttaatcgatgcgattaattacatgttccctagtgttaatgttacagatgaagatattgaatcaacatgggcaggaattagaccattaatttacgaagaaggcaaagacccttctgaaatctctcgtaaggatgaaatttgggaaggtaaatcaggtttattaactattgcaggtggtaaattaacaggctatcgtcacatggctcaagacattgttgatttagtatctaaacgcttgaaaaaagactacggtttaacatttagtccatgtaatacaaaaggtctggcaatttcaggtggcgatgtaggtggtagcaagaactttgatgcgtttgtagagcaaaaagtagatgtagctaaaggattcggcattgatgaagatgttgcaagacgtttagcatctaaatatggttcaaatgttgatgaattgttcaacattgcgcaaacatctcaataccatgatagcaagttaccattagaaatttatgtagaacttgtttatagtattcaacaagaaatggtatacaaacctaacgatttcttagttcgtcgttctggtaaaatgtatttcaatattaaagatgtattagattataaagatgctgtcatcgatattatggcagatatgcttgattactctccagctcaaattgaagcatatactgaagaagttgagcaagcaattaaagaagcgcaacatggaaataatcaaccagcagttaaagaataattaatttgtacaatcataaactggtgtcctgttttaagggcatcagtttttttatacgagatacattagtcaattgaaactatgcatcactaaatgtatgataataataaaagcgaatataaaagcgttgttattaaaggtgtgagatgatgactgaaaaacaatttaaattaactgtacaagataatacgaatattgaagttaaagtgaattttacagatgtagattcaaaaggaattattcatatatttcatggtatggctgaacatatggaacgttacgataaattagcacatgcactttcaaagcatggcttcgatgtgatacgtcataatcatcgaggacatggtattaatattgatgaatcaacaagagggcattacgatgatatgaaacgagttatcggtgatgcctttgaagtagcgcaaacagtgagaggcaatgttgataaaccatacattataatcggacattcaatgggatccgttatagctagattgtttgtagaaacatatccgcaatatgttgatggtctaattttaagtggtactggtatgtattcattatggaaaggtttaccaaccgttaaagtgttacaactgattacaaaaatttatggtgctgagaaacgagttgaatgggttaaccagttagtatcaaatagttttaataaaaaaatacgtccattacgtacacaaagtgattggatttctagtaatccaattgaagtagataactttattaaagatccatatagtggatttaatgtgtcaaatcaattattatatcaaacagcctattatatgctacatacatcacaattaaaaaatatgaaaatgttaaatcatgccatgcctatattattagtttcaggatatgacgatcctttaggtgattatggtaaagggattttaaaattggcgaatatatatagaaaagctggcattaaaaatgttaaagtgaatctttatcatcataaacgtcatgaagtgttatttgaaaaagatcatgacaaaatttgggaagacttgtttaaatggttgaatcaattttataaaaaataaagaaagtggaattaaatatgaataaaaataagccttttattgtagtaattgtggggccaactgcttcaggtaaaacagagcttagcatcgaactcgcgaagcgtatcaatggtgaaatcataagcggtgactctatgcaagtctacaaacatatgaatattggaactgcaaaagtaacacctgaagaaatggatggtattccacatcatttaattgatatcttgaatcctgatgatacattttcagcatatgaattcaagcgattagcagaagatttaattactgatataacgaatagaggtaaagttccaatcatagcaggtggaacaggcttatatattcaatcattaatatataattatgaattagaagatgaaacagttacacctgcacaattatccatagttaaacaaaagttatctgcattagaacatttagataatcagcaactacacgattatttagctcaatttgatgcggtttctgcagaaaatattcaccctaacaaccgccaaagagtgttgcgcgctattgaatattatttaaaaacaaaaaaacttttgagtaatcgcaagaaagtgcaacaatttactgaaaattatgatacattattattagggattgaaatgtcgcgtaaaacattatattcaagaataaataaacgtgttgatattatgttggatcacggattatttagagaagtgcaacaacttgttgaacaaggctatgaatcttgccaaagtatgcaagctattggatataaagaattaatacctgtgattaacggacaaatgatttatgaagatgctgtcaatgatttaaagcaacattcacgccaatatgcaaaacgacaaatgacatggttcaagaataaaatgagtgttcattggttagataaagaaaatatgtcacttcaaatgatgttagatgagattacaacccagattaagtaaaaggagtccgacagatgattgcaaacgaaaacatccaagacaaagcactagagaattttaaagcaaaccaaactgaagtaactgtattctttctaaacggtttccaaatgaaaggtgttattgaagaatacgacaagtatgtcgtaagcttaaattctcaaggcaaacaacacttgatttacaaacatgcgatcagcacttatacagtagaaactgaaggtcaagcatctactgaaagtgaagaataagttgtaatcatatgggcacgatttaatgactcgtgtacataacgtttgaagtatgataaatagatatagaaataaagtcatatgtgacatcaattaaatgatgttcaaatgacaagatacaatagaggaatgtttgtaataaaaacgcttcatataaaggtcgagtcaatatatgatacgactttatatgaagcgttttatttgctatgagctagtatattttataataatttttctatttctctttcgatttgaacaggttttttttgaggtgcaaatcgtttaacaacgttaccttcgcgatccactaaaaacttagtgaaattccatttgattttctcattaaagaatccgtgttgtgccgcagtcaaatatctaaataaaggtaattgatgttccccttttacgtctattttttgatgcatagggaaggtaacaccatagtttaatttacagttttgagctgcttcttcgcctgaaccaggttcttggccaccaaattgattacaagggaaacctagaattacaaacccttgatctttgtatttctcgtataatgattgcaaaccttcaaattgtgaagtaaagccacattcgctagctgtattaacaattagcataacgtcacccttatatgcatctaatttgtaagtaacacctttatttgtttctactacaaaatcataaattgtctccattgtatcatcctttcgatttacttaaaatgtaccacaaaatcgtgtaatagtctttactaaaactctatgatagaatactttgagtaggattttattaaggagatgtataacatggctcagcaacaaattcatgatactaaaaataaactagaaaaagctgtcttagtcggtgtacatgctcaagatgataagcaatttaattttgagtctacaatggaggaattatcatctttatcagagacttgccaacttgaagtgttgggtcaaattactcaaaacagagatcgtgtagatcgcaaatattatgttggtaaaggtaaaattgaagaaattcaagcatttattgagttcaaagatattgatgtagtcatcacaaatgatgaattaacgactgcacaatccaaatcactaaatgaagctttaggtgtaaaaattattgatagaactcagttgattcttgaaatatttgcattaagagcaagaagtaaagaaggtaaattgcaagtagagctagcacaacttgattatttattacctagattgcaaggccatggtaaaagcctttctcgtttaggtggcggtattggaactagaggccctggtgaaacgaagttagagatggatcgcagacatattcgaactcgtatgaatgaaattaaacatcaattgcggacggtagaagaacatcgcgaaagatatcgaaataaaagaaatcaaaatcaggtgtttcaagtagctttagttggttatacaaatgctggtaaatcatcatggtttaatgttttagcaaatgaagagacgtatgaaaaagatcaattatttgcaacgttagatcctaaaacacgacaaattcaaataaatgatggatttaatttaattatttcagatactgttggttttatacagaaactacctacgacgttaattgcagcttttaaatcaactttagaagaggctaaaggtgcagatttattagtacatgtcgtagatagtagccatcctgaataccgtacgcagtatgacacagttaatgatttaatcaaacaattagatatgagtcatatttctcaaatagttatttttaataaaaaggacttatgtgatcatgcatcaaatcgtccagcaagtgatttgcctaatgtttttgtttcttctaaaaatgatggtgataaattacttgttaagacgttatttattgatgaaatcaaaaggcaattaacttattatgatgagacaattgcgacgaataatgcagatcgattatattttctaaaacaacatacattagtgactgaacttaaatatgatgaaattgaaaatgtttatcgtataaaaggatttaaaaaataataaaaggacgaaattcaaatgaaagatataagtaagatagtagctgacgtcgaatcaacgttagcaccatattttaaagaaattgaagaaacagcatatattaatcaagaaaaagtattaaatgcatttcatcatgtcaaagcaaccgaaagtgatctacaaggatcaacaggatacgggtatgatgactttggacgtgatcatttagaagaaatatatgcgcaggcatttaaagcagaagatgcaattgttcgtccgcaaattatttcaggtacgcatgcgattactattgcattacaaagtttattaaaacatggtgatgaattaatttatataacgggtagtccatatgacactttacttgaagtcattggcgtaaacggaaatggtattgaaagtttaatggagcatggcgtatcgtataaagatattgcacttaaagaaggtaagatcgatattgaaagtgtgttagatggggtttctgagcgcaccaaagtaatagcgattcaacgttcgaaaggctatgatcaaagaccttcaattccgctagatgaaattgaaaaggtaattactaggttgaaaaacgtgcatcctaatattttaatatttgtggataactgttatggggaatttgttgaaagacgtgaacctatagaatgtggtgccgatttaatagcaggatcattaattaaaaaccctggcggtggtttagctaagattggtggatacattgctggtagaaaagatttaattgaacgatgtggttatagattgacagcacctggtattggtaaagaagcgggtgcatcattaaatgcattgcttgaaatgtatcaaggtttctttttagcaccacacgttgtcagtcagagtcttaaaggtgcattgtttactagtttatttttagaaaaaatgaatatgaacacaacgccgaagtactacgaaaaacgaactgatttaattcaaacagttaaatttgaaacgaaagaacaaatgatttcattttgtcaaagtattcaacacgcatccccaattaatgcacattttagtccagaacctagttatatgcctggttacgaagatgatgttattatggcagctggtacgtttattcaaggttcatcgattgaattatctgcagatggacctattcgtcctccttatgaagcatatgttcaaggaggattaacatatgaacacgttaaaattgctgtgacaagagctgttaatcagttgaaagaacaaggacttatataatagattaaatttcaccctaaatgataatgtgttttgggtgaaattttttgcggagatttatcagattatttttaaaaattgaaaaaatattttagctgtagattgttttatgtcgttttagaagtcgaaatcgcagttatatcaatgttttaagctttatgttagaaaacctgacatatttttgaaatcctaaaaaaattatgataagttattaacaagttcaaaagtagaggagaggaacaatgatatcgaatgatgcaatcagacgaaatatggctgtcttctctatgagtgtagtaagtaagttaacggatttaacgccaaggcaaatacgttactatgaaacacatgaactcatcaaacctgaaagaacagaaggtcaaaaacgtctgttctcactcaatgatttggaaagattactagaaattaaatcattattagaaaaaggatttaatatcaaagggattaaacaaatcatttatgactcacaagagcatttaacaacagatgaacaagagataagaaaaaagatgattgtagatgccacgcaaaagcctattggagaaactttgccaataaatcgtggtgatttatcccgatttattaaataaaatttggaggattttaaaatgccaaaacgtactttcactaaagacgacattcgtaaatttgcagaagaggaaaatgtaagatatttaagattacaattcactgatattttaggaacaattaaaaatgttgaagtgcctgtaagccaattagaaaaagtacttgataacgaaatgatgtttgacggttcttctatcgaaggtttcgtacgtatcgaagaatcagatatgtacttacatccagatttagatacttgggtaatcttcccatggactgctggacaaggtaaagttgcacgtttaatttgtgatgtatataaaacagatggaacaccatttgaaggggatcctcgtgcaaacttaaaacgtgtattaaaagaaatggaagatttaggcttcacagactttaacctagggcctgaaccagaattcttcttgtttaagttggatgaaaaaggggaaccaactttagaacttaatgatgatggtggatatttcgatttagcacctacagatttaggtgaaaactgtcgtcgtgatattgttttagaattagaggatatgggcttcgatattgaagctagtcaccatgaagttgcccctggtcaacatgaaattgactttaaatatgcagatgctgttacagcatgtgataatatccaaacatttaaattggttgttaaaacaatcgcacgtaaacataatttacacgcaacatttatgcctaaaccattattcggtgtgaatggtagcggtatgcactttaacgtttcattattcaaaggtaaagaaaatgcattctttgatccaaatactgaaatgggcttaacggaaactgcatatcaatttacagcaggtgtgcttaaaaatgcacgcggatttactgctgtatgtaacccgttagtaaactcatataaacgtttagtacctggttatgaagcaccatgttatattgcatggagtggtaaaaaccgttcaccattaatccgtgtaccatcttcaagaggattatctactcgtatcgaagtacgttcagtagatccagctgcaaacccatacatggcgttagctgcaatcttagaagctggactagatggtattaaaaataaattaaaagttccagaaccagttaaccaaaatatttacgaaatgaaccgtgaagaacgtgaagcagtaggcattcaagacttaccttcaacactttatactgcattaaaagcaatgcgtgaaaatgaagttattaaaaaagctttaggaaatcatatctataatcaatttattaattcaaaatcaattgaatgggattactacagaactcaagtctctgaatgggaaagagatcagtacatgaagcaatattaatacgctaaacaatgatgggaaatcagtaatatcaagggctagagcattttgctttagctcttttttgatttggaaagatgggatttcacttgaccacttttgttaaaaaatggatttggtcaagttttggtcaagtaaatgttttatgtatttatttttttaaagctggggaagaccattttatattttagttcacatgaattttaatatatttggaggtgatgagatgaggcgataaaagaacgtcgcgaaaacgttgagtattacttgaaaatagccatattcatattacttctcatcgaattcatttgcagaacgttctaaggtaagaccccgaaaagagggaccttactacgcattattaagggggtaatactatatgaaaagagaaacaaaacaaaaaatatctttttgtttatcgatcggtattttcattttagttatactactattgatattctaaaaaattaaaaatttcgcctcatctaatttatgaattgctatgatgaaatattcaatacaatcaaagaattgatagaaaacaaagagatatcgagttatcaaattaataaagatactgggataagttacggtaatattaatgctatgcgccgtagagaaagaagaatagaaaatttaagcttaaagaatgcaaagatcttatatgaatatgcgaaaaaggtattgtaatataagcattgagttcaataggcatacaataactgcccaaactagtgactgagtgggtgcttttatagtattaaaagttttctaaaagtgaaagaaatcatgtttagtgatttacttatgtttttcaaaatagtataataattttatataatatatagagcttcagtataccttttgagtatatatggagttctttctttttatacaagatgtatatgtataaatggaaatatttaatacattacataaaaacctttaggtgcacttagagggatgttaatcataaaaaaagagattttgaaaaatataggctattatactttagaattacaaattataaatcttgccagtggatatgggagttcaacatgtcacttaccccaatttgtggaatgttaaataactataaagaggaaaggagaaaaaatgataagaatggttaaagaaaaagaacgaatagcaaaattaaatttcgaatagctgtgacgagcttaataattcaagtacttaattttatcaaatcgttcttttaaaaaggtaaagggcaaaagacctttaccacattaaatagggaggtggtatttatgacaagagaattaaggaaaaaattaactctctatcttaacattgcaactttaatattatttattattaatttaactagaaaaaaataaattattctttcattttaacaaaaattatgaaccagtttaaagaaatttataatacaatagaaaaattactaaatgataaatcaatatctaattatagaattaatcaagacactgatgtttcttatggtggtataagtgaattaagaagcgggaaaagaaaagtgaataatttaactttagaaacagcggaaaaactctataattaccaaaaacaattagaaataatgattgaagattaaaataaggccatatttttgaaatatcatggagtgagccttttaagtcatctaattttaaagtatattaaatatggataacttaatgtgaatataaataaaaaattatcaaataatataatatagaatagatggagacaagaaattttatcaatatataaaaaaaacgccaatactattaggtattagtttatgaattaactagtttggcaactagaaaaaaacaatgtattgctaaacgtagttactgcattaggattattataattataaatagaaagagagtgtgattaataatgaatgagattgaaactattataagtgaaatagaaaagttattaactaacaatacaccatatagtatttcaaaaaactcaggtgtaccacgtcaaacagttactgatttaaaggtaggtaaaactaaaataaaagaagctaaatttaaaacgataatcaagttatatgaatatcaaagaacattagaaaataaaacagaatgttaacaaaaatattttgttaggttaggtggacaagaaattaaatttctaatgatttcatggttgtctgtccacgttttgtccacctcaataagataatctcttagttttagaaattgtacatggttaaataatcaaaaatgcatattatgaaattatcattgccattaaatcttgaatgatctttaagcgatgatataaaaggctgaacacagtaaataagttaactttaatgcagtattctatactatacatattttgtaataatgtttatgcacataatttttcattgacaattttttatattaaattgtgtaattggcatatatgatgatttgtgataattatattgtaatatagcatttggttttatgattctaaaattaatagatttgaaaagtatactttatttcatgaaagtttttggtacatttatttgaaaatgtttttattacaaagttacatggctaaatgtttcttaacaaaattaatttttcgagtgtaaagaatcgtgtggtaaacataatttatatagattataaggaggtgaaaatggtcgaggaagttaaaacgataaaatagtttgaatgttttgatttcaattctggtaggactattgaatttgcaatctaataagaatgtgaggtttgatttaatatgaagtcatattctttgaataaaatattactttctcaccattagtaaaatgaagatgactattaaagtgcgaaaaacaaataaaaaagagaaaatagaatttttaatagggacgtttataattattttagtaatattagggttcaaaattatgaaataaatgtatagtatttgagaagtctatatgactccggaaaaattaaattctaaagatatctcaatatctcaaatttaatagactactggagttagtagtttgaatattgaaagacactaatctaataaaaatacataaaaggttaaactttagaagtggctgtaaacttcaatgaatactaaacattgaagttttgtaaaaggcgtaaggtatacaagacaaatcgtttatctttgacaaagtaattgatgatgaaaagtcgttaatatgtagaaacaaaaattgaaaatataaaatttaactattatgaagtgatgatagccattaatgaatagaaaaataataaaatcatttatagataaaaaatacgttaagttcacagaatttcgaaaaaaagcagaaaacattgtacagatatggagatgaaaaaatgtcagaatacaagaaaaaaataattgaattaattgaaagtaatttaacaggatatgaaatttctaaaaaaactggagtttctcaatacgtactttcacaattaagacagggcaaacgcgaagtagataatctaaccctgaatacaacagaaaaattatatgaatatgccaataaagttttgtaatttaactaatgtataaattaatcaagctatgtttatttgatttaactattaataaaaatcatatggtgaatggatattataataattaaaatacaaaaatagtagattccaatttgtgaaaaaggagtatgtcgtttcatttagaatttattgcacgaaattagcatcgaataagggaaaataagtgttaagttttaaatgataaaaaagattggaatggatcgtcttgaaatgctcccttcaaagttttcattttttcaatgtcgacttcgaagggggcattttcattaaattgttatagctttttatatttgtataatgaacatataagtttaagaaggtgcgagtgaaggaaataaaaaagctcaaatgtaccaaattgttaatcttaataaatctctactttataaagattgaatggacattcgagcgttaatcagtcaggagggactttccctcctacaatttaataataatacttgcttcaccactatacaaggagtgagttgttatgttcaaagtgaattattcgattttaagttattatccagaatataatatcgcagtaagttggcaacgtttaagagaaggaaaaacaataaaaaacaagatttaatactgctgcgtcatgaggcgcttgaacattatttgatgaataagtataatttcaactatgattatgcacataaaattgtatcaaaaaaatacgattattcaatttttataaaaaagaaggtggattaaatgcttacattaataaaattgaaagaagatgaacaggttataatatatgaatatatacctgaagatgatataagtaacggtaaaggttcagtaacttttaataaaaaagatgcagaggttatagatttctcattatctgaaatagaaaatgaagaatattttatgttatatcgtaataagtctttttctgtagtaagagactttatcgagaagcaagaatttcccgaaaattataaaatagcatggtattaaagcatcctttctacacagataaagagaaagcgatgctatttttatatgcttttttcattattcgttgaaaaagaagagtcacaaaagttaacatatttaaaagaacttggtgaagatggcgaatataaatatgttgccaaaatagatagtaaaacatctaaattatgtcattcactcaacggaaaaatatttaaagttaaagatatgataccaggtgtgaatgcgccacctatgcatccttggtgtagaagtaccacagtgccacatgtcggcaattggcgagacaagttctttaaagagcgtgaaggtaaatatcaagtagaaggttgttttattgaatcaggtgcacttaataataaaagtgatgaatacggtatcaaaaggaacagacatgctcaaatttattataattcagttagaaatcgagataaacagatagagatttctaaaattgctaaaaatactaatataaataaaaatttaattcaaagagtttatgaacatatatttgaaaataagtatttattagaaagtggatttaaacaatttgatcctgacttttatatggctcaaagttggcaacgtttaagagaagggaaaaatattaaaaaaatggatataataatgtagaaacatgaagctcttgaacactatctaatgaataagtataatttacactatatagaggcacataaacttacagaaataaaatataattatagtattttaattaattagaggtggaaatgattgctaatattaaaaataaaagaaattaatgataaaagtgttacatataaatattttcctaataatgatgaaaatattaagcctggtattattcaaatggatatagatagtcttgaagttatcaatgctgaaaaatctagtttagaaaaaaatacaagagataattattttattcatgccatagacagaatatacataaatactagtaaagggctatttcctgaatctgaactcgtagcatggggataaagaaagtttactttaaaaattttaaccttcaaatgtgaaggttattttttattgcccaaaacgtgctgatgacattttaaaagcaagtatggaatatcagtcgacagactataaacggaggtatatctcatggaaaacaatgatagcaatgaagtagcttatttgttaaaagatggtaaatttacaaaagtatatgtcaatcaagatagtgtatcttttgtgccagggtaacaagcaaccgaattattatttaacagtaaaccgaattcaattgttatgttacataaccatcctggacagtcaggattttcagaatatgatttatttacattttttaagcatccatcaataaaatcaatgacaatcgttactaataagggacaagtaaaatttattaccaagtcaaataggtttcatggtaaaatagtgagtaaattttgtgctaaatattttacgcatattaatatcattaatgatagccatattgaaaaattattgaaaaaactttatagtataaatatgattaaatataaagtgagatgattttaattatgttagattcacaattagatggaaatgtaactgcaaaagaattgagtgaatcttttaaagaattagttgaagaatttgaaagtatagaaaaagcgaaaaagaattcaaattcaaaagataaatagcatcctttttagacagataaagagaaagtggtgctatttttatacgcttttttaactatttactgaaaatgcagaagcacaaaagttaacatatttaaaagaacttggtgaagatggcgaatataaatatgttgccaaaatagatagtaaaacatctaaattatgtcattcacttaacggaaaaatatttaaagttaaagatatgataccaggtgtgaatgcgccacctatgcatccttggtgtagaagtaccacagtgccacatgttggcaattggcgggacaagttctttaaagagcgtgaaggtaaatatcaagtagaagtaaaagaagcataattacaggaaaaagctaaaaaccagatgaaagaaatgattaaaaatggtaaaataaaaatagaaataaattgcggaaaaataaaatagatatatgttaggtcatcacctatataatgaaaataaaaaaagagccattttaaataataagaaattgcctagctatacaatactttctatagatttattgaatgaattgttaagagaaaaaatgtcaacaggcaatctaatattaagtgatgagcgatttgatttgaaagagattattaattttaatcaaattattggaaaaatacatatcgaaaatgtgtatattgaaaccagaaagggaaaagtgcattattcgaagacaggtgctcatatagtaccttatattgataagtaggtgaaaagtattgagaattgaagatgcatatcgtaaagatgttattatcacgcttttgaataatgaagaatacgaagggtttgtaactgactatgaaaatgaattcgagagcgaaacaggaaatcttgttgtagatatacagactgattttgctgtttattcgtttgatgaaactgagataaaaagtattagattattaaaataattacaaaatagcatcctttctacaaaaagctaaaaaagaaatgcttgaaatgataagtaatggtaaaatgacgatgaaattgaataatgttaagcaaaagcgtcatattttatgcacaaatgaatataataataagaaaaataattcatctttattaccaagttatactataatagattctaatgaaagtgaaaagatgactaaaaaagaatttattgatattccagttttgtttgatgatgaagggaattttagaataaaacaagttatagattataaaaagataataggtaaatcttatgtgaatggtaaatatattgaaacgaaattaggtaaggttcattattctaaaactggttttcatgtagttccgtatattaaaaaggagtgattaaatatgaatttacagtcatacataggcaaattagtcaaattaacgcttactaataataaaatattaattggaaaagtgatagactttgatgataaagttgataattttgatggttataattcgatagaaattgatacaggtagaattacatatgatatatcagaaaataaaattaaaactattgttttacaataatagcatcctttctacacagataaagagaaagcggtgctattttttgcgcttttataacaactaaggatacaagacacataacttcaacaatatcctcatctaaacctatcgatttcctaagctcaattttaaacacaaagtttatttgaaatgatgcacacctataaaaatcttaatcatcgaaaagtcacaaacatctccatattaaaaacttaaatagtgcattccatttaaactaaacatcgatattcctaccaatatagacttagtaattcgattgttaatacattactttcataaaataactacaaccatcataatacttctcaaatgtcgtcaaattaaagtaaatacagcacaaattaacatttttaaatatataaaataaaacaagatactcaataatctgtagtaccttgttttggaataatgtaattttatatcatcaacggctacaaatgagcagtttcatatataaataaacacatctactcaactgatcttaattaattaataaatgatttaccagatgacatataacagcattattagattaattctaatagtttatttaaattttcttcagttgtcgcccaactggttgcgaatctaacaacacgatgttgatcatcgtatttttcccaaacagcaaatttaactttttgttctaactctgctattttctcgttacttaaaataaaaaattgttgattggttggagaatcaaagtaaagacgatagcctttatttttaaacccgtctttcatcttatttgccatttcgatagcatgtctgcttatattaaaatataaattgtccgtaaataattctaaaaattgtatgcctgttaaccgtccttttgctaaaagggcaccgtgatgcttgattcgagtggtaaattgtttcggttcattatttttcgtaaaaacaatggcttccccgcataatgcacctatcttcgtaccacctatataaaatacatcacaatatttagcgatgtctttaatagtcatatctgattggtcactcatcaatccataccctaatcgtgcaccatccataaataatggaagctgatattgcttacatactttgcataactcttccaattctgatttagagtataatgtgccatattctgtaggatgagaaatatataccattcctgggaataccatatggtcctttttaaaatcacttttaaatgtctccatgtaagtttcaacatctgaagcactaacttttccttccttagagggtatagtaattactttatgtccactatattcaattgcaccgccctcatgcacagcaacatgaccagtgtctgctgaaatgaccccttcgtaactttctaacattgaattaataacaacctgattggtttgtgttccacctactaaaaaacgaattgtagcatttggacagtcaattgtatctttaatcttttcaattgcctgagctgtgaattgatcaaagccatatcccgaagcttgtacaagatttgtatctactaatcgttttaatactttttcatgagcaccttctaaataatcattttcgaatgaaatcactacatttccccctaaaactaatatcaacattttaataagataaaccaatttcaaaactagttcgatatttaaaatgtattatgaatggttaaagtttgtatcgcattatcgcgaagttgaataaatatattatacatcaaacaatacattatgaaaattaattaattttttatcacagcgacttttcatgctggaacacatgtattaatgattgaattttactgttaaaagttctatgatttaggaaatagagaaaagaggggatttaaatggaacaaattaaacttaaaacttttacagctgagactttagagttattagaaaaaaacattaatgcttttttaagttctgaagaagctacaaatttaaaattagtaaatattactattaaagaaatagaagaaagaacattcccaaataatgaagaagaattcaatgcaattttaactttatctgtgaataaataatatgacgtgaaaggtgcaaaatgtttttttgtgcctttctttataggagaaaagactatgcgatttacattttcaaacgatttaggaacgttatttactattattttagccattggattcatcattaatttagtattggcttttattattatctttttagaaagaaataggcgtacagcgagttcaacttgggcatggctatttgtactttttgtcttaccattgattggttttattctttacttgttttttggtagaaccgtttcggcacgcaaattgaataaaaacaatggtaacgtgttaacggatttcgatggacttttaaaacaacaaatagaaagctttgataaaggtaattatggtactgataacaaacaagttcaaaaacatcatgatttagtacgtatgcttttgatggatcaagatggttttttaactgaaaataataaagttgatcatttcattgatggaaatgatttatatgatcaagttttaaaagatattaaaaatgcaaaagaatatatccatttagagtactatactttcgctttagatggtttaggtaaaagaattttacatgctttagaagaaaaattgaaacaaggtctagaagtaaaaatattatatgatgatgttggatctaaaaatgttaagatggcaaattttgatcattttaaatcgttaggtggagaagttgaagcattttttgcttcaaaattaccgttattgaatttcagaatgaataatagaaatcatagaaaaatcatcgtaatcgatggtcaactaggttatgtcggaggatttaacattggtgatgaatatctaggattaggaaaattaggatattggagagatacgcatttacgtatacaaggggatgcggttgatgcactgcagttgcgatttattttagactggaattcgcaagcgcaccgtccacaatttgaatatgatgttaagtatttccctaaaaagaacggaccattgggcaattcaccaattcaaatagctgcaagtggcccggctagtgactggcatcaaattgaatacggttatacaaaaatgattatgagtgcaaagaaatctgtatatttacaatcaccatatttcattccggataattcatatataaatgccattaaaattgctgctaaatcaggtgtagatgtacatttaatgattccatgtaagccagatcatccattagtatattgggcgacattttcaaatgcctctgacttattatcaagtggtgttaaaatttatacgtatgaaaatggatttatacattctaaaatgtgcttaattgatgatgaaatcgtatcagtgggcacagcaaatatggactttagaagttttgaattaaattttgaagtaaatgcctttgtatatgatgaaaatcttgctaaagatttaagggtggcttatgaacatgatattacaaaatcaaaacaactaaccaaagaatcatatgccaatagaccgctgtctgttaaattcaaagaatcgttagcaaaattagtttcgccaattttataatttatttgtaaggagtctcgattatagaggctctttttattttgcccaaaattaaaataacgataaatatattatgtaaatctaataatgacatttgtcatttcaaatctatgacaaagtgttctattttaaatctaataaatttactaatattaaattaagaaaaaaatagaggtgattaaattgattcaaatatctaatatcaacaagtcatttaataaaagatgtgttctaaaaaatatttcgttcgatattgaacaaggtaaatgtatcgctttaattggaaaaaatggtgctggaaagtcaacgttaattgatatattaattggtaatgttaatgctaattctggtgagatatttgataaagacaagttattacaaagtgaaaatcgcagtataatgttccaaaaaacgatgtttccagatcaattaaaagttattgagattatcaacttatatcaatcattttacgaaaatccattaccattggaagaaataatagaactgacgaaatttgattctagtcaactgaaccaatttgtaaataaactttctggtggtcaacaacgattactcgattttgtattatctttaatcggacaaccacaattgatcttattagatgaaccaacatcgactatggatatagaaattagagaatatttttggtcaattattgaaaatttaaaagaagataatcgaacgatactctatacatcgcactatattgaagaagtcgaacgtatgtcagacaaaattattctcattgaaaatggagaaataatacttaatgattcaacgtcacatattagaaccaatcagcaatctcagattacgttatccgatgaatatataagaaagttaaaactagataaagatgatttagttattcaaaaaaatcataatggcactatcaaaattattacttcaaatgtaaatgatacgattttatatcttcaacaacttcatattaatttggatgatattgaaatacaaaaagtctcaattgttgattcatacttcaacaataaaaagcaaaggggatctaattatgatactaagttacttgaaaatcgaatttaaagttataatgcgtaaaaaaacaacattaatattatctattttatttcctgttatattctatatattatttacttcgatattggaattgccggaagatgttaaacctaaattttataaagagtatatgtatagtatgacggtttatagtttgttaagttttagtttactaacttttccattagatattattaatgaaaaacaaaatgaatggcgccaaagattaatggtaacaccatttacttttactagttattatatttcaaaagtagtgaaaactatgctgcaatttgcaatagcgatattagttatttttatggttggacatttttataaaggtgttgcaatgagtgcagttcaatggttagagtcaggaatatttttatggttaggtgcgtctctattaataacttttggcatattattttctttgttaaatgatattcaaaaaacaagtgctttagctaatatcgtaacaattggtttagcagtattaggtggattgtggtttccgataaacacatttccaaattggcttcaacatgttgctcatgttttaccgagctatcatttgcgtaaactaggtgtagatattgcttcaaatcatcatatcaatttaatatcatttgctataatactcttgtatgctttagggagtataatagcagtatattgtattagtcattttaaaagggcggaataaaatatgaaatttttaaaagatacttcaattgctgaaatatcgtctatagtttatctgatttttcctattgccggtatattttttaatgaagtatatggtcccaaatggttgtatattatatcagtcattgtcttttcgttgtcgtatcttatattagttatagtaaataatagacttaatacattaatgttttacattttgttgattattcattattttattatttgttattttgttttcagtgtacatccaatgctaagtttgtttttcttttatagtgcttttgccgttccatttacttttaaaaataatgttaaaaaaacggcaactaatcttttcatactaacaatgattatatgtacaataataacgtacttattgtataacaactattttgttgcaatgatggtttattatgtcgttatatcgttaataatgctagataattttaaaaaaatgaaaaaccgtgaatatcaaaaagaaatagcagaaaaaaatagacatattaatacattaattgctgaacaagagcgacatagaattggtcaagacttacatgatacgttagggcatgtgtttgcaagtttatcattaaaatcagaattagcttataaactaatagatgctgatgtagaaaaagtaaaagctgaattattagcaattaataaattatctcgtgaatcattgaacaaagttcgagaaattattgatgatgtaaaattaccatcatttattgaagagattgatagtatacgtaaagttttaaaagatgctgatattgattttacatttgaaaataaagaattagcgcaagtattaagtcctactaaacaatctatgttagttatgattacgcgtgaagcgataaataatgttattaaacatgcaaatgcttcaaaagttcatggtaaattaaaaactgtaaacaatcataaattactgcttatgattgaagatgatggcaaaggtatcgatagtgattgtgaggtgaaaagtatttcacagcgtgtacaacatttaaatggaactttagcagtcgactcaacaaatggaactaaaataatcattgaaatctcaacaggaggaatagcatgacatctttaattattgcagaagatcaaaatatgttacgacaggcaatggttcaattaattaaactacatggtgattttgaaattttagcagatactgataatggtctcgatgcaatgaaacttattgaagaatataatcctaacgttgtttttttagatatagaaatgccaggcatgactggacttgaagttttagcggaaattagaaaaaagcatttgaatattaaagtgattattgtaacaacttttaaaagaccgggatactttgaaaaagcagttgtgaatgatgtggatgcatatgttttaaaagaacgttctatagaagaattggtggaaaccattaataaagtaaataacggagagaaagaatatagcgccacattgatgacttcattttttgtagataaaaacccattaacgcccaaagaacaaattgtattaagggaaattggcaatggtttaagtagtaaagaaataagtgaaaaattatttttgacagatggaacagttagaaattatacatctgttataattgataaattatttgcagataatcgttttgatgcttggaaaaaggcaaatgaaaaaggctggatctaaatacaaacaaaaaagtattgagtgttttgatttaagagacttggaaagtgagtcaataatcaaaatcttactcaatacttttattttggtactcgcaatttagatttgttaactaattttttcgcttattataaaacgaaacaatcaagtaaacgataaagcctacaaagatacccaataaaatagatagtactgccgtcactattaatggtaatttgaaaaatatttgtaggaaaataccaatgataattgcgataattactgcaattaatgtgactgtattttcatttgaaatgttcatttattttcactccttaacaataacattatatcatgctatagctttccaaaatattgaaatatgtagatatggctattgacgatatttcttaacttttatatgattaatcggaatgaaaaaagagaagtaggtggcaatatgaagtcaaataaatcgcttgctatgattgtggtagccatcattattgtaggtgtattagcatttcaatttatgaatcatacgggtcctttcaaaaaggggacgaatcatgaaactgtacaagatttaaatggtaaagataaagtacatgttcaaagagttgtggatggtgatacatttattgcaaatcaaaatggtaaagaaattaaagttaggcttataggggttgatacgccagaaacggtgaaaccgaatacgcctgtacaaccatttggcaaagaagcatcaaattatagtaagaagacattaacaaatcaagatgtttatttagaatatgataaagaaaaacaagatcgctatggtagaacattggcgtatgtatggataagtaaagatcgtatgtacaataaggaattagtggaaaagggacttgctagagagaagtatttttcaccaaatggcaaatatagaaatgtatttatagaagcacaaaataaagctaaacaacagaaattaaatatttggagtaaataattaaataggtgattatatatattaaagtaaaatatacttgaagcatcgatttattattaccataaatttatatatagaaataatttaaaggcataataaccatagtgcgtatcgagcgtaatggattattatgcctttgattttacttgaatatagctgtgatttgatcaacctgttctttatttaaagggtgtttagatagctctatggcttcgctaataatacgtcgtaacgaagattttgttgaaactgtatcaacatatttatctctttcttcagaaccttgaatgatattaactgtaccatcactaaagtaaataacaccggtactttggactttaaagttaaagttttgttcaatatgatcctttaatgctttcgcattatttgctgctaattgatacggatcataatcataaaaatcataaataacacgatttggttgaactgtttctgtaaaagtatagatagactttcttgatgaattaaactgatcatgatattgctggctaatgtaatgaccgacaactttttcaatattactattgcttatttctgtatcatgctcatcaggtacatcaaagtgataaaatgttttttcaccccagctttttacatcaacgtttattaaaccgatatctgaaacaatgataaaatcaaatgaacgtgcatactcgaaaaacggatgtttagtagctaaattgcttgtaacgataatatcgtaatattttaatttaccattttcgagatagctatctaaaatcttgcgtaattctcttttagcatttttgtatgcatggtggccaacatcattattagaactcagcatttgacttcttaattcagcattttctgcacttaatgctttgttctttttaataagttgctttcttgcataaacttcggtatctattttactattactatacctttgatttaaaactaatataccaattaatgctacaatgataatgataagtacaacataaaaagacattttttcaccaatcctttttgacttctttaactttgtatacaataataattaataaagattaattgttattcaatttcccacatttttattagttgattttagttcatcattgttataatcaaattataaactgacagatattgatgttcaatgaatatgacgtgaaagattcgtgaattcaagtttatgtcgaatttatgttataacggtcatttaaatgacagaattaggtcactcatagtattttgaagattgaattcattaattttaaaatgtataatgatatttgtgaaagcgcttgcttaggaggtgtatttgagagtgaatgaaatgaatgctaaagaacaattagtggacaatttaatgaaaacatcatcgcaattatttaaatttcacggtgaagttgccatgcagcttttcttaaatgatgaattaaaattaccttctattgttgaaatatgcgtggaacgtaagcgtttaagtgatattgtgaaagttattccgcaatcatatgcgttactatacatagataagcaagatcaagcaatagctaaagaagatttatcactttcaaaaattgcaaaagtttatgtgcaatatgatgatacaacaataatgagtattttcgtttatgatgtagtaaacgatgaatggatttttagattggatccgaatatacgtatacctaagagtaacatatacttccatagtttaaattgggatgtggattatattaaaccggagatcgttctaatgtatgatctaatgcaacaccatcagtatcatcattattccaattataaacgagtcatagatgcattaagctactatcaattttttattttaaaatttgtagtaggtgagcaacgtattaaggatgcaatccagagaacaataaataattaagaaaaagcaattcataacgcagttgaatacatgtgttacgaattgcttttatattagtttttatcacacaagttttttaatgcaaccccgtgatagcaaaactcatatgtagataatacagctttttcagcatcatctacatgaattccaaacatcatcgagatttccgaagcaccttggttaatcatttttaagttaatttttgattcagctaaggcatgtgtaattttatttgcagtaccgatgactttattcataccttcgccgacaatcattaatattgctaaatcatgctcaatacttagctcatcaacatcacatttttgacgaatttcatttaatacttttgtttctttattttgaatttgttttgaacgcataacgatactgatagtatcaatacctgaaggcatatgatcaaatgaaatattattatcctctaagacacctaatatctttctagtaaagccgacttgtctattcattaaatactttttgatattaataacggtaaaatctttatcacaacttataccgctaatcacatttttcgcatttatttctctatcatgcactataaatgtacccttatcttgagggcggttcgtatttttaatcaccacagggatgcgatctttataaagtggttgtaaggcttcatcatggaaaacactaaaaccagcataagataattcacgcatttctcgataagtgatttcttcgattaattcaggatctttgatgatatttggattagctttataaataccagacacatcggtgaaattttcataaattgtggctctaacaccacttgatatgatggcgccagttatatctgatccgccacgtggaaatgtaactatatatccttcatgagatacgccaaaaaatcctgggataattagtttttcatcataatctcttaattttttaatttcagagtaagcactatctaatatttgtgcttcttgtgggacgtcagtaacaaaaatacccgcttccttcggtgatatatattttgttggtataccttgactattattatataaagctatcaattgcgcattaaaatcttcaccacaagaaagtaatgcatctaatagtctctttggttcattttttaattgattaatataatgttccaaagtcacatctatcgtccgtaaaatactttcatccatttgcaattcttttacaatatcatcataacgctgaataatttctctttttttatcatgataatcaagatgattaatgaccttttcatataatctgattaacaaatcagttgttttaatatcattatcatgtcttttacctggagcagaaacgataacaatctttcgctctggatcagaattaacaatatttaaaacctttttaatttgagtagcattggagacggagctaccaccgaatttggaaactttcatagtgcatgccaacctttctaaaaaatcagaaaattgtattcagttttgtaagtaagaatgatattatgtatttatattttgaatattacgaactttacaaaaataaagaataattctatactatactatcatctagtgtttttcaataatacatttgtttttctcaaaagcacaaacggaggtacataaaatgaaaaaattaaatatagcattattaggattaggtactgtcggatctggtgttgttaaaatcatcgaagagaaccgacagcaaattcaagatacattaaataaagatattgtcataaagcatattcttgttcgagataaatctaaaaagagaccgctaaatattagccaatatcatttaactgaagatgttaatgaaattttaaatgatgattcattagatattatcgttgaagtcatgggaggaattgaaccaactgtagattggttaagaacagcacttaaaaataaaaaacatgttattaccgcaaataaagatttattagcagtacatcttaaacttttagaagatttagcagaagaaaatggtgtagctttaaagtttgaagcgagtgtagcaggtggtattccgatcgtaaatgccataaataatggtttgaatgcgaataatatttcaaaatttatgggaattttaaatggtacctctaattttattttatctaaaatgactaaagagcaaacgacatttgaggaagcacttgatgaagcgaaaagacttggttttgctgaagcggatccaactgatgatgtagaaggggtagatgcagcgcgtaaagttgtcattacatcatatttatcatttaaccaagtcattaaattaaacgacgttaaacgaagaggaattagtggcgtaactttaactgatattaatgtagccgatcaactggggtataaaattaaattgattggtaagggaatatatgaaaatggcaaagttaatgcatcggtagaaccaacgttaattgataaaaagcatcaattagcagctgtagaggatgaatataacgcgatttatgttattggtgatgccgttggtgacacgatgttttatggaaaaggagcaggcagtttagcaacaggtagtgccgttgtcagtgatttattgaatgtagcattattctttgaatcagatttacacacattgccaccacattttgaattaaagacagataaaacacgggaaatgatggattcagatgcagaaattaatattaaagaaaaatccaatttctttgtagtagtgaatcatgtcaaaggttcaattgaaaattttgaaaatgagttaaaggcaatattaccatttcaccgatcattaagagttgcaaattacgataatcaatcatatgccgctgttatagttggattggaatcatcaccggaagaattaatcactaagcatggatacgaagttgacaaagtatacccagtagaaggagtttaattataatgagaagatggcaaggattagtagaagagtttaaagcacatttaccagtaaatgaaaatacaccaaaattaacattgaacgagggaaatacaccactcattcattgtgaaaatatgtctaaaatactaggcatagatttatatgtgaagtatgaaggtgccaatccgacaggttcatttaaagatcgcggtatggtaatggctgtgacaaaagcaaaagagcaaggtaagaaaattgtaatatgcgcttcgactggaaatacatcagcgtctgcagcagcatatgcagcgagagcaggtttaaaagctatcgtcgtaataccagaaggtaaaattgcattaggtaaattgtcgcaagcagtaatgtatggtgcagaaatcgtttctattgaaggaaactttgatgaagctttagaaattgtaaaagaaattgcaaaaagtggcgaaatcgagcttgtaaactctgtcaatccatttagaatcgaaggacaaaagacaggctcatttgaaattgtacaacaattagacggtgaagcacctgatattttagcgattcctgtaggtaatgcaggtaatattactgcatattggaaaggctttaaagaatatcatgaagctaaaggatcacaattgccgaaaatgtttggcttccaagctgaaggcgcatcaccaattgttcaaaataaagtcattaaaaatcctgaaacgattgcaactgctattcgaattggtaatcctgctagttgggataaggcgactaatgctcttaaagaatcaaatggattaatagatagtgttactgatgatgaaattctagaagcatatcagttaatgacaactaaagaaggtgtctttagtgaaccagcgagtaatgcttctattgcaggtttaattaaattgcatagacaaggtaaattacctcaaggtaaaaaagtagttgctattttaactggtaatggattaaaagatcctgatactgctatttcactactagataatccgataaagccattgccaaatgataaagatagcattatcgattatattaaaggagctttataacatgtcgaatgttttggagttaacaattcctgcatcaacagccaaccttggagttggctttgattctataggtatggctttagataaatttttgcatctgtctgtaaaggaaacatcagggacaaaatgggaatatattttccatgatgatgcatctaagcaattgcctactgacgaaacaaactttatttatcatgtagcacaacaagttgcttctaaatatagtgttgacttgcctaatttatgtatcgaaatgagaagtgatattccattggcaagagggttaggttcgtcagcttctgctttagtaggagctatatatatcgcaaattattttggtgatatccaactgtctaaacatgaggtattacaattagcgactgaaatcgaaggacatcctgataatgttgcgccgaccatttatggtggtttaatcgctggatattataatgatgtctcgaaagaaacgtcagttgcacatatcgacataccagacgtggatgtgattgtaacgataccaacttatgaactaaaaacagaagcatcaagacgtgctttaccacaaaaattaacacatagtgaagcggttaaaagtagtgcaattagtaatacaatgatttgtgcattagcacagcacaattatgaattagcaggtaaactcatgcaacaagatggctttcatgaaccgtatcgtcagcatttaattgctgaatttgatgaagtgaaaacaattgctagtcaacataatgcctatgcaactgtaattagtggtgctggaccaactattttaatatttagtcgtaaagaaaatagtggggaattggttcgctctttaaatagtcaggtagtatcatgccattctgaattggtcgatattaatatcagtggtgttaaagaacgaattgtataccaatagacgctttatattgtaaaatagtattaaatgcagaatagagaggagatttaatgcgatatgacaaattataaagttgtcgttttagatatggatgacacattgctaaattcagataatgtgatatcagaagaaactgcaaattatttaacagcaattcaagatgaaggttattatgttgttctagcatctggtagacctactgaaggtatgattccaactgctagagatttaaaattacctgaacatcatagctatattattagttataacggtagtaaaacgattaacatgactaatgaagaagtagaagtaagtaaatcgattggtaagcaagatttcgatgaaattgtagattattgtcgagatagaggctttttcgttcttacatatcatgatggtcaaattatttacgacagcgaacatgagtatatgaatattgaagcagaattaacaggtttaccgatgaaacgtgttgatgatatcaaagcgtatattcaaggcgatgtacccaaggtcatgggtgtagattatgtagcgaatattacagaagctagaattgatttgaatggtgtgttcaatgataatgtagatgctacgacaagtaagccattcttcttagaatttatggccaaagacgtttcaaaaggtaatgcaattaaagcgttatgtcacaaattgggatattcggtggatcaagtcattgcttttggtgatagtatgaatgataaatcaatgtttgaagtcgcaggtctagctattgctatggggaatgcatcagatgaacttaagcaatatgcaaatgaagttacgttggatcataatgaaaatggtattccacatgcgctcaaaaaattgttataaattttaaaataagccttaacacatgatatttgaataagatatcttgtggttaaggctttttatttttgtgaaaatgacttcagttatactatggaggatttgaaatacatattttagattagtaatgatatcaaacgaatagagtaaatgtatattttttgaataaatcaagtattaactagtcacggaaggtagataaataaatttgatcattctgaataataacgaatgcattaaaaaatgcagtgacaatctaacattaattgttaaaatcactgcaagcatcttgattttatttagctgtttgtgtccagtcatgcttacctctgaaacgttttacatgagcatatatttggtcagcagtataatctaaatttgtataaactgtaatactgaacgctgattggttttcagcaaatgattcttcggaaaataattcctttaagtgcataaataaatcattcatttgtttatggtttaaaccgggatattcccttaaagttctctttaataattgtccgttcttttcttctaatgcttgaactacaataacaaatctttcatcttgctttagtacatcatcaaataaatttgtttgtccaatcattgaatttcacccctgaaaagttattgttatctatattatacacgatatgcaaaatatctaaaataaagaatggtaacatggtaataataaaatataaacagaatactagttaatacactttatactagaaaaagatattaaagtatatctgctttacaccattaaaaagcggcaaatgctatagataatctaaagcatctgccgtatgagaatttatttatttttgattgtcataatcgtgtggttttaaattaattgtttctagctttacaaattttgttttgtgaatgattttatgaataaagtaaatcaacgctagaatgattaaaggtaaaaagtttttaaaagcatttaaccattgatcttttaaaatatattcaactgagccaccaaatagcaagaataatagtgtagtgatgacaatgattggtcctaatggataaaaaggtgctttatatggtaggaccttattagggtcttgaccttgttttttaatagcttgtcgcaatcgtatttgtgaccaaatgcttgatccccaaacaactataatcattgaaccaataatttcaagtaaattaaaaacggcatttgaattaaagtttgcataaataataacaataacaacgactgcataagtagttaataatgctcttaaaggtaacttagttgtcttgtttaatttacttaaaaattggggtgcttttttgtctgaacttaaggaatacaacattctgcctgttgtataaacacctgaatttgcagcggataataatgaagttaaaataaccgcgttgattactgatgctgcaaaggctatgcctactctatcgaatacaattgtaaatgggctttgacttattgaactacttgctcttaataatgatggatctgtgtacggaataattgcaccaattactgcaattgataagacatagaataaaagaatacgccaaaatacttgtttaattgccttaggcatagactttttagggtcatctgattcaccagcagttactgctactacttctgtaccaccaaccgaaaatccggcgactaataatacgcctaagaaaccagagataccaccaacaaacggtgcttggccttttgtatagttttcaaatccatatgtatgaccacctaagataccgaaaatcattaaaaagccaaaaataacgaatacgataattgttaacactttaatcaatgataaccaaaactcagtttctccaaatgattttacagaaaaaatgtttaataatagtaaaattgtaataaagattaagctccaagtaatggggtggaaaaatttaaatgtgtcccagaaataaagcacatttgacgctactatgacatcaacacttgtaactaatgaccacaatgcccaatacaaccatcccatggtaaagccaagagatgagtcaataaagcgtgttgaataagagctgaatgaacctgatactggataaaatgttgccaactctccaattgatgacattaagaaatatagcatgacaccaataacaagataagcgagtatagcgcctccaggaccagcttgagaaatgatattaccagtagctacaaatagaccagtcccaattgcaccacctatagcaatcatggaaatgtgtcttgagttaagactacggttcattttattatcttccatatttagtctcccatctatttaaatatacccattattgtaagctttttaagtgtactattcaataactatttagtactgtaaagcgaaaaaattaaaattttctgattttttaatcatcttgagcatgtttaattgtaattttgatggggttaaattataatatgtattaaattataattattataaattgtggagggatgactatgtcacaacaagacaaaaagttaactggtgtttttgggcatccagtatcagaccgagaaaatagtatgacagcagggcctaggggacctcttttaatgcaagatatttactttttagagcaaatgtctcaatttgatagagaagtaataccagaacgtcgaatgcatgccaaaggttctggtgcatttgggacatttactgtaactaaagatataacaaaatatacgaatgctaaaatattctctgaaataggtaagcaaaccgaaatgtttgcccgtttctctactgtagcaggagaacgtggtgctgctgatgcggagcgtgacattcgaggatttgcgttaaagttctacactgaagaagggaactgggatttagtagggaataacacaccagtattcttctttagagatccaaagttatttgttagtttaaatcgtgcggtgaaacgagatcctagaacaaatatgagagatgcacaaaataactgggatttctggacgggtcttccagaagcattgcaccaagtaacgatcttaatgtcagatagagggattcctaaagatttacgtcatatgcatgggttcggttctcacacatactctatgtataatgattctggtgaacgtgtttgggttaaattccattttagaacgcaacaaggtattgaaaacttaactgatgaagaagctgctgaaattatagctacagatcgtgattcatctcaacgcgatttattcgaagccattgaaaaaggtgattatccaaaatggacaatgtatattcaagtaatgactgaggaacaagctaaaaaccataaagataatccatttgatttaacaaaagtatggtatcacgatgagtatcctctaattgaagttggagagtttgaattaaatagaaatccagataattactttatggatgttgaacaagctgcgtttgcaccaactaatattattccaggattagatttttctccagacaaaatgctgcaagggcgtttattctcatatggcgatgcgcaaagatatcgattaggagttaatcattggcagattcctgtaaaccaacctaaaggtgttggtattgaaaatatttgtccttttagtagagatggtcaaatgcgcgtagttgacaataaccaaggtggaggaacacattattatccaaataaccatggtaaatttgattctcaacctgaatataaaaagccaccattcccaactgatggatacggctatgaatataatcaacgtcaagatgatgataattattttgaacaaccaggtaaattgtttagattacaatcagaggacgctaaagaaagaatttttacaaatacagcaaatgcaatggaaggcgtaacggatgatgttaaacgacgtcatattcgtcattgttacaaagctgacccagaatatggtaaaggtgttgcaaaagcattaggtattgatataaattctattgatcttgaaactgaaaatgatgaaacatacgaaaactttgaaaaataaatttgatatgtagtttctatattgcgtagttgagcagtttatgatatcataataaatcgtaaagattcctaacaagagagggtgtttaacgtgcgcgtaaacgtaacattagcatgcacagaatgtggcgatcgtaactatatcactactaaaaataaacgtaataatcctgagcgtattgaaatgaaaaaatattgcccaagattaaacaaatatacgttacatcgtgaaactaagtaattcttatcattcaaatacgacgatttgaaaataaagcgggcttacctattatattggggagctcgcttttttatgaaatttttgtgaagagtgattaatggattgagtttcatcggtagaacaatatatgattatattagttgttactttattaaaatttgagaatatttatagaaggaaatagattactgattttataaagtcactttgttagcgaatgcttgaaagagtatttaatatagtagaatttaaaatttcaaagcggaatttaataagtacgaagtaattctgggtatgttttataaatgttcgataatacactttaatcttaaatatgatggtttagaaaatgatttaacaaagaaatgaaactttactgttgaattatgtgaggattgtgttattatataaatcgtaataattacgatttgataaaaagtgaggtaactatatatggctaagaaatctaaaatagcaaaagagagaaaaagagaagagttagtaaataaatattacgaattacgtaaagagttaaaagcaaaaggtgattacgaagcgttaagaaaattaccaagagattcatcacctacacgtttaactagaagatgtaaagtaactggaagacctagaggtgtattacgtaaatttgaaatgtctcgtattgcgtttagagaacatgcgcacaaaggacaaattccaggtgttaaaaaatcaagttggtaaaatcaaatttcgtactttagcccatttacaatatcaataaaacaatgtacagtatatacgaatgctataaactgaatgttttctcatattaataaggaaacattcggtttttaatttgcatttaaaaataattagtttttaaaggggctatttaaagtgaaaatatttgattacgaagatattcaattaatacctaataaatgcatagttgaaagtaggtctgaatgtgatacaactatccaatttggtccgaaaaaattcaagctacctgtagttcctgcaaatatgcaaacagttatgaatgagaaattagcgaaatggtttgctgaaaatgattacttttatatcatgcatcgttttgatgaagaagcaagaataccttttataaaacatatgcaaaattcaggcttatttgcatctatttcagttggtgtaaagaaagcggaatttgattttattgaaaagttagctcaagaaaaattaatccccgaatatattacaatagatattgcgcatggtcactcagattcagtgataaacatgattaaacatataaaaacccatatacctgatagttttgttattgctggtaatgttggtacgccagaaggtgttagagaattagaaaatgctggtgctgatgctaccaaagtcggtataggtcctggtagagtttgtattacaaagattaaaacaggttttggtactggtggttggcagttagcggcattaaacatatgtagtaaagcagctcgtaaacctttgattgccgatggtggtataagaacgcatggcgacattgctaaatcaattagatttggtgcatcaatggtcatgattggttcattatttgcggcacacgaagaatcacctggtgaaactgtagaacttgatggtaaacagtataaagaatattttggtagtgcatctgaatttcaaaaaggcgaacataaaaatgtagaaggtaaaaaaatgtttgtagaacataagggttcattaatggataccttaaaagaaatgcaacaagatttacaaagctcaatttcatatgccggtggaaaagacttgaaatcattacgtactgtagattatgttattgttagaaactctattttcaacggtgatagagattaatatttatagtaggtgatgtaaattaaaaaattcatagtaactgttgttgcgtttttatcaattattatcattgcgccaataacagaatttaaaccattcattcatttacaaaatgaagtaagacaatatattgacattcacatcaataaagaaacaatttctgcggaaaataaattggatacaccgaagaaacaacaatttgcctttaataatatacaaatgaacatgtcgaaatcagatgttgagaaaacattaaataaaccaaaaagagtgacatttaatgaatatggtacgaagtggtatacgtattatgatgacgattacaataattttataatgataagttacatgaaagataaagttaatgcgttatatacaaatcaaaatataatcacttcaaaatcaaaaattaaatataatacacctaaatcggttgtaaggcaaagattaggcgaaccagaaacagagattgttaaaggtagagtgcgttacgaacaaaataataaagaatatgatgttttccataaaaatcacatttatacgacggtattttatgataagcatcgacgtaataatgtaacagctgttttacaagtaagtgatgctatggaaaatagattaaaagaacaatatggagcaccatcgaaatcgcttgcagatagttttgaactacaaaattttgatttagttaatgctgaaagaaaacaacatcaattatctacattgaagtattctaaacagaattctgaaactgcacgtaagcatagtaaagatatggccaacaatcattattttgatcatacaaatttaaaaggtcaatcaccatttgatcgattgaaaaaagatggtattacatttaactcagccggagagaatttagcatatggtcaagttagtagtatctatgcacatcaaggattaatgaattctattggtcacagaaaaaatattttaaatgatacgtttaaaatattaggtgttggtgttgattttaatgatgaaaaacaacctttttggacagaaaattatactggttaatgtttttggcatgagattaaagggtaatgtttgtctgtaaggaagtagataaacatgatgacaacagataaaccaaaagatgcggatatacttgaacgcgtcaaagatatacttaataaaaaagaaagaaaaaaataataatggctcgctcctgtaaattattacgggggcgagttttaatttgtgtaacattttgcagaaatctgtaattcaaaatttatattaaagaatgagattatctaacaattcgcaatttctgtttgaactgaatttagattagaataaataaaacctcttgaaaacgtaactttttcaagaggtccaaaatttataaaaatgagggcttaacaattacgataatatataacggtttaaaatattacatttcgcggtacaaaccaattactttcccaattacagcaacattgtctaggtaaattggctccattgtactattttcaggttgtaatcgataacgatttttttctttatagaagcgtttgacagttgcttcatcttcctcagtcatagcaacaataatgtctccattttctgctatggtttgactgcgaacaattactttgtctccgtctaatataccagcctcaatcatactgtcgcctacgacgtttaatatgaatatgtcgctattgtgtgtcgatgttaagtgttcaggtaatggaaaatattcttcaatattttctactgcggtaataggaacacctgctgtgactttaccaataactggcacatgaatcgtttcttccatattaatattatcatttgtttgatcacttacaatttctatagcacgtggtttcgttggatctcttcttatatagcctttttcttcaagacgtgaaaggtgaccatgaacagttgaactggatgctaagccaactgcttcaccaatttcgcgaacactaggcggataacctttcgtttgaacaacttgtttaatatagttatatatttcgctttgtcgttttgttaattctctcatatataggcactccctaaattaatttaaatacagtatatcattaatttgaaaccaaaacaaacatttgttcgttaaaatattgacacagaacataagttctgataaattactaatacaaacaaatgttctaggagtgaaaatgatgttttacaataaatataaaaacgtatcaacatatatcatcatatttttagtttcaagtgcagcctttgcaatattcttgttaagtgcgaacattagtgctcactcggaacaagtgtacgaaatgactgaccatcaaattaagaacaatacgataaataaagcatacgaacataaagaccctacaaacaatagcgaacaaagagatgggaaagtgttcgctttaataaattgatacattgtcacaacgttattttgcctatttttgcgaaatagcgttttttattacttttttgctgatcttaaatttgttatattttgttaaagtattataatgattgaataaacaaattgaaggtaggttttttaattgagtaattctgatttgaatatcgaaagaattaacgagttagctaaaaagaaaaaagaagtaggattaactcaagaagaagcaaaggagcaaacagccttaagaaaagcttatcttgagagttttagaaaagggtttaaacaacaaattgaaaatactaaagtaattgatccagaaggtaatgatgtaacacctgaaaaaattaaagagatacaacaaaaaagagataataaaaattaaatcacaaatctgtaaagaattttctgacattataacttgaaataagtattttacttatctttttattttaaaataagttataatgtatttgataaaattgaagaagggaagatacacaagatgtttaatgaaaaagatcaattagctgttgatacgctacgtgcactaagtatcgacacaatcgaaaaagcgaattctggtcatccaggattacctatgggagctgccccaatggcttacactttgtggacacgtcatctgaattttaatccacaatctaaagattacttcaatagagaccgtttcgtattatctgcagggcatggttcagcattattgtatagcttgttacatgtttctggtagtttagaattagaagaattaaagcaatttagacaatggggttctaaaacaccaggtcatcctgaatacagacatacagatggtgtagaagttactaccggaccacttggacaaggttttgctatgtcagtaggattagctttagcagaagatcacctagcagggaaatttaataaagaaggatataatgttgtagatcattacacatatgtattagcttctgacggtgatttaatggaaggtatatcgcatgaagcagcttcatttgctggacataataaattaagtaaattagttgttttatacgattcaaatgatatttcattagatggcgaattaaacaaagctttttctgaaaacacaaaagctcgttttgaagcatatggttggaattacttactagttaaagatggtaatgatttagaagaaattgataaagcgattactacagctaaatctcaagaaggaccaacgattattgaagttaaaacaacaatcggatttggttcaccgaataaagcaggaactaatggtgttcatggggcacctttaggtgaagttgaaagaaaattaacattcgaaaattacggtttagatcctgaaaaacgttttaatgtttcagaagaggtatacgaaattttccaaaatactatgttaaaacgtgctaatgaagatgaatctcaatggaattcattattagaaaaatatgcagaaacatatcctgaattagcagaagaatttaaattagcgattagtggtaaattgcctaaaaattataaggatgaattaccacgttttgaactgggtcataatggtgcatctcgtgctgattctggtactgttattcaagcaatcagtaaaactgtcccttcattctttggtggatcagcagaccttgctggttcaaacaaatccaatgtaaatgatgcaactgattatagttctgaaacacctgaaggtaaaaatgtgtggtttggtgtacgtgaatttgctatgggtgctgctgtaaatggtatggctgcacatggaggtttacatccatatggtgcaacattcttcgtatttagtgattatttaaaaccagcgttacgtttatcatcaattatgggattaaatgcaacgttcatcttcacacatgattcaattgcagtaggtgaagatggtcctactcatgaaccaattgagcaattagctggattaagagccattccaaatatgaatgttatccgtcctgctgatggtaatgaaacaagagtagcatgggaagttgccttagaatctgaatctacacctacttcattagtattgacacgtcaaaacttaccggtattagatgtaccagaagatgtagttgaagaaggcgttcgaaaaggtgcctatacagtttatggctctgaagagacaccagaattcctattattagcttcaggttcagaagttagtcttgcagttgaagctgctaaagatcttgaaaaacaaggtaaatcagtacgtgttgtttcaatgcctaactggaatgcatttgaacaacaatctgaagaatataaagaatcagttattccatcaagcgtaacaaaacgtgttgcgattgaaatggcttcaccgcttggatggcataaatatgtaggtactgcaggtaaagttattgctattgacggctttggcgcaagtgcacctggcgatttagtagttgaaaaatatggatttacaaaagaaaatatcttaaaccaagttatgagcttataagaataatttataaagcgagtatgtttagaagtctaggatgcataatcttaggcttcttttaaagtgttgaaatttagagtatagcacttaaactacatcataagtgataagttatgaaagtatactatttcagattaatctttaaaagctctgttataacagcatgatttttgatattatttttagtatcgatattaaaatacttgaataaactagttcttgaaataatgtgatgaatttagtaaaattcagtaggataaagaaagcgggtgaaacaatggcaacttggttagcaattatttttatagtagctgcattaattttaggtttaattggaggtttccttttagctagaaaatatatgatggactacttgaagaaaaacccaccaatcaacgaagaaatgcttcgtatgatgatgatgcaaatgggtcaaaaaccttctcagaagaaaattaatcaaatgatgacgatgatgaataaaaatatggatcaaaatatgaagagtgcgaaaaagtaaattcgcaattgatagaggctattttccagatatggaaatggcctctttttataatcaaattaataagaataaatatgtttattaaaattaaagttaacaaaatgacgaatagactgagaaatgctataattcattttgtatgatttacagagagtttatttaacgagaaggtgtctgcgtgctctatttaatattttcaatcattgtagctttatttatgggaactatagttatagttattcgtatgaaagctcaaaattatccggtaaatgagaaaaaaatagttttgccaccgttttttatggcgaccggtgcattgatgtacgtcgttccatattttaggctaacaggatcggaaatgctagaagcctttataattggtttgcttttttctacagttctaatttggacttctcgatttgaagtcaaaggtacagaaatttatatgaaacgatctaaagcatttccagttattttgatttcattacttatcattcgtactgtgatgaaaatattcattagtaatgaaatagatcctggagaattaggcggcatgttctttttattagcattctgtatgattgttccttggagagcagcaatgctatataaatacaaaaaactaaagaaaacattaatcaattaattacttttaaaaccacttgtgatcgacttctaaatcagtcaatgagtggttttaattttacttgaaaaggtgaaatgattatattaaaataaaagcgaacaaatgttctatatggaggcagtaatgaaaattatacatacagcagactggcacttagggaaaatattaaatggcaaacagcttttagaagatcaagcgtatattttagatatgttcgtagaaaaaatgaaagaagaagaacctgatatcattgtgatagctggagatttatatgacacaacatatccaagtaaagatgcaatcatgttattagaacaagcgattggaaagttaaatttagaactgcgtataccaataattattattagtggaaatcacgatggtaaagagaggttaaactatggggcgagttggtttgaacataatcagttatttataagaacagattttacatcgattaattcaccaatagagataaatggggttaatttttatacactcccttatgctactgtgagcgaaatgaaacactactttgaagatgacaccattgaaacacatcaacagggaattacgcgctgtattgaaacaatagcaccggaaattgatgaagatgccgtcaatattttaattagtcatctgactgttcaaggtggaaagacatctgattctgaaagaccattaactattggaacggttgaatcagttcagaaaggtgtttttgatatatttgattatgtcatgctaggtcacttgcatcatccatttagtatagaagacgacaaaattaaatatagtggctccttattgcagtattcattttcggaagcgggtcaagctaaagggtatagacgtgtaacaattaatgatggcattattaacgatgtatttattcctcttaagccacttagacaattggaaattatctcaggcgaatataatgatgttattaatgaaaaagttcatgtgaaaaataaagataattatttacattttaaacttaaaaatatgtctcatattactgatccaatgatgagtttaaaacaaatttatcctaatactttagcgctgacgaatgaaacttttaattacaatgaagaaaataatgctatagaaataagtgaaaaagatgacatgtcaattatcgaaatgttttataaacatataactgataaagaattatcggatatccaatctaaaaagataaaaaatattttagaaaacgaattgagaaaggaggattaatgaatgaaaccattacatttaaagttgaataatttcggcccctttttaaaagaagaaattgatttttctaaaattgataataatgaattgtttttaataagtggtaagactggatcgggtaaaacaatgatttttgatgcaatgacttatgccttgtttggtaaagcatcaactgaacaaagagaagaaaatgatttgagaagtcatttcgctgatggtaaacagccgatgtcagtaacatttgaatttcaattaaatcatcgaatttataaagtgcatagacaaggcccttatatcaaagaaggtaatacaacaaaaacgaacgctaaatttgatgtatttgagatggtggatggcaagtatgaaattagagaaagtaaagtaatttcaggtacccaattcattattgaattattaggagtaaatgcagatcaattccgacaattgtttattttgcctcaaggtgaattcaaacgctttttaatatcaaacagtcgtgaaaagcaagggatattaagaacactgtttgacagtgaaaaatttgaagctatacgagaaatattaaaagaagaagtaaaaaaagaaaaagctcaaatcgagaatagatatcaacaaattgaccttttatggcaagaaattgaatcatttgatgatgacaatataaaaggcttattagaggttgccactcaacagatagacaaattgattgaaaatataccacttttacaagctaggtcgaaagaaatactagcatctgtaaatgaaagtaaagaaactgctattaaagaatttgaaataatagaaaagaaaacattagaaaataatatattaaaagataatattaatcaactcaacaaaaataaaattgatttcgttcaattgaaagaacaacaacctgaaatagagggaattgaagctaagttaaagttgttacaagatattacaaacctattgaattatattgaaaatagagaaaaaattgaaactaaaattgctaatagcaaaaaagatatttctaaaaccaataataaaatattgaatcttgattgtgataagcgaaacatagacaaagagaaaaaaatgttagaagaaaatggagatttaattgaaagtaaaatctcttttattgataaaactagagtattatttaacgatattaataagtatcaacaaagttatctcaatattgaacgcttgagaactgagggtgaacaattaggtgatgaattaaatgatctaattaaaggtttagaaacggtcgaagattcaataggtaataaccaaagtgattacgagaaaattatcgaactaaataatacgataacgaacataaataatgaaattaatataattaaagaaaatgaaaaagctaaagctgaattagataaactattaggtagtaagcaagagttagagaatcaaattaatgaagaaacatctatattgaagaatctcgaaataaaattagatcgctacgataaaacaaaattggacttaaatgataaagaaagctttataagtgaaattaaatctgctgtaaatattggagatcaatgtccgatatgtggtaatgaaattcaggatttagggcatcatattgattttgacagtattgctaaacgtcaaaatgaaattaaagaaattgaagcaaatatccacgctataaaatcgaatattgctgtgcataattctgaaattaaatttgttaatgaaaaaatatcgaatattaatattaaaacgcaaagtgatttttcacttgaagtattgaataagcgtctgctagaaaatgaaaatgcattgaataatcaaagagatcttaataaatttatagaacaaatgaaagaagaaaaagataatctaacgttgcaaattcataataaacaattgcgtctaaataaaaatgaatctgagttgaaattatgtcgagatctcatcactgaatttgaaacactctcgaaatataataatatcactaattttgaggtggattataagaagtatgttcaagatgtgaatcagcatcaagaactctcaaaggagattgaagataagttaatgcaattgtctcaaagaaagttaattgagcaaaataatctaaatcattatgaaaatcaactagaaacttacaataatgacttagaattgaatgaacagtctattgaaatggaaatgtcgaggctgaatttaactgatgacaatgatatagatgaaataatagcctggaggggcgagcaagaggaattagagcagaaaagggatacttataaaaaacgttatcatgaatttgaaatggaaatagctaggttagaatcattaactaaggataaagagttattggactctgataaattaaaagatgaatatgagctaaaaaaaggaaagatgaatacactgatagatgaatactctgctgttcattatcaatgtcaaaataatattaataaaacacaatctatagtttcgcatattaattacttaaatcaagaattaaaggatcaacaagaaatatttcaattggctgaaattgtcagtggtaagaataacaaaaatcttacattggaaaactttgtcttaatttactatttagatcaaattattgctcaagcaaatctgagattagcaacaatgtcagataatcgataccaactaattaggcgagaagcggtttctcatggtcttagtggcctagaaattgatgtatttgatttgcattcaaataagtctagacatattagctcgttatcaggtggagaaactttccaatcgtcgcttgcattagctttagggttaagcgaaattgtacagcagcaatcaggaggtatttcactagaatcaatatttattgatgaaggattcggtacattagatcaagaaacgcttgaaacagcgttagacactttattaaatcttaaatcaactggtagaatggttgggattatttcacatgtgagcgaattgaaaaatagaatacctttagttttagaagtgaaatcagatcaatatcagagttcaacaagattcaaaagaaattaaaacataaaaaatagagatggtactttggaatgtatagaacaaccttagcccatctctttttatttaaaaattattttttctcacgtaataaatctctgatttcagttaataacacaacattttcttccacaactgcttcttcttcggcttcttctttcttcattaatgtatttgcaatcttaacaaagatgaataaagcaaacgcgatgataataaagtcgataacagattggataaataaaccgtatttaataccccagaatgaccattctttagcaaaatcaactgatccgaaaattttaccaattaatggcataatgatattttctactaatgaagatataatcttgttgaaagctgcacccatcacaacagcaattgctaaatctaagacgttaccttttaaggcgaactctttgaattcttttaacattacactcaacctctcttttttaaatgtaacctcaattatacaacaaataaaaaaattagaaaatagattattcaagaaaatttgattatcgcaaagacctttgttatcctataaaggtgcgtgagttattgaataaaatgtttagataatatttttattctactacataaaattaaatatagaattgaagggagtaattaattatgaattcttcttcaccagagaatccaaatggaaagaagtattcaccagtcttcatctatagtgcaattgttgttgctatagtcgtattacttggtgcatttttacctgaacaattcaactatgttaccaataatattaaaatgtggattacagaaaagttaggttggtattatcttattcttactacgattatcgtgttcttctgtatattccttatttttagtcctattggaaaacttaaactaggtaaaccaaatgacaaacctgagtttaatacaatttcatggtttgctatgttgtttagtgctggtatggggataggtttggtgttttatggtgcagctgaaccgatggcgcactttgctacgccacctacagcagatcccaaaactactgaagcttatactgaagctctacgttcaacatttttccattggggattccatgcttgggctgtttatggtgttgttgcgttagcgttggcatattcgcaattccgtaaaggtgaaccaggtttattatctagaactttacgtcctcttttaggtgataaagtagaaggtcctattgggatttttattgacgttttatctgtatttgcgacaatcgttggggtagccgtttcgttaggtatgggtgctctacaaattaatggtggtttacattacttgttcaatgttccaaacaatacgtttgtacaagcgattatcatcattgttgttactatcttatttatagcaagtgcatggtctggattaagtaaaggtattcaatacttaagtaacttgaacattggtttaggtactattttaatggtagctgctttaattgttggaccaactgttcttattttaaatatgttaactagctctacgggtagtttactaaacacattcttgtttaatagttttgatacagcagctttaaatcctcaaaaacgtgaatggatgtcttcatggacactttattactggggttggtggttaagttggagtccattcgttggagtgtttattgcacgagtttcaaaaggacgttcaattagagagttcatttctggtgtcttgctagttccagcaattgttagttttgtttggtttagtgtctttggtgtattaggcatcgagacaggtaagaaacacaaagaaatttttgatatgactcctgaaacacagctatttggagtgtttaatcatgtgccatttggcattgttttatcgttgattgcattattattaattgcatcattctttattacatctgctgactcagcaacatttgtattaggaatgcaaacaacatttggttcattaaatccatctagtatggtaaaagttgtttggggaatttcacaggccttaatagcatttgtacttttattagctggtggcggtaacggcgctgaagctttaaatgcgattcaaagtgctgcaattataagtgcattcccattctcctttgtcgtcatactcatgatggtaagtttctacaaggatgcgaaccaggaacgtaaattcctaggtttaacattgactccgaataaacatcgcttacaagaatatatcaagagtcaacaagaagattatgaatctgacattcttgaaaagcgtcagtcacgtagaaatatagagaaaaaagataactaataaagtttagttaagtattttaataacaagtagtatgtcattctagtagctagaacagatatactacttgtttgtttttgtggaaaattgagtatattcaaaaggataagaacgagaatttcgttattaaactacgaattctcgatttttttatattttaagataggtttatttctgaaaacttaatagaaaggggtttgacaaagctaaagtgaagtttgacggtataaacgcaaattaaatatacttttatagaaaattaactcaggctgggacataaatcaatattctatgctctacgaagttatattggcagtagttgactgaacgaaaatgcgcttgtaacaagcttttttcaattctagtcaggggccccaacacagagaatttcgaaaagaaattctacaggcaatgcgagttggggtgagggccccaacacagaagctgacgaaaagtcagcttacaataatgtgcaagttggggatgggccccaacaaagagaaattggattcccaatttctacagacaatgcaagttggggtgggacgacgaaataaattttgcgaaaatatcatttctgtcccactcccatcaaaagaatgacattgaaaaaaatattaaagtttggtgccataattttctttctgctcaatgaaataatacgtttaaaaattgaattgaatcattcgcgaaattgataattattctcaattaataaaaaatacttattacaccttacctgtatgataagttttgcttatatactctgattaaaaagtcaaaacctaaattaagcgttttctaagcatgatgagttgtttatcaataaatataataatacaatttaatcaaggcatataaatataaaaatgtatcaagggggatcattaaatggctgcaaattttaaagagcaatcaaaaaaacattttgacttgaatggccaaagttatacttactatgatttaaaagctgtagaagagcaaggtattactaaagtttccaatttaccttattcaattcgtgttttgttagaatctttacttcgtcaagaagatgattttgtaattacagacgatcatattaaagctttaagtcagtttggaaaagatggaaatgaaggcgaggtgccatttaaaccttctcgtgttattttacaagatttcacaggtgtaccagccgtagttgatttagcttctttacgtaaagcaatggatgacgttgggggagatattactaaaattaatccagaagtaccggtggatttagttattgaccactcagttcaagtggatagctatgcaaatccagaagctcttgaacgtaatatgaaattagaatttgaacgtaactatgaacgttatcagtttttaaattgggcaacgaaagcatttgataattacaatgcagttcctcctgcaactggaatagttcaccaagttaacttagaatatttagcaagtgttgtacatgttcgtgatgtagatggtgaaaaaactgcatttccagatacattagttggtactgattcacatacaacaatgataaatggtattggcgtactaggatggggtgttggtggtattgaagctgaagctggaatgcttggacaaccttcttatttcccaattccagaggttattggtgtacgactagtaaattcattaccacaaggcgcaacagcaactgatttagcgttaagagtaactcaagagctacgtaaaaaaggtgttgttggtaaatttgtggagttctttggtccaggtgtacaacatttaccactagcagaccgtgctacaattgcaaacatggcaccagagtatggagcaacttgcggattcttcccagttgatgatgaatctcttaaatatatgaagttaactggtagatcagacgaacatatcgcgctagtaaaagaatatttgaaacaaaaccatatgttctttgatgttgagaaagaagatcctaattatacagatgttatcgaattggatttatcaacagttgaagcatcgctttcaggaccaaaacgtcctcaagatttaattttcttaagtgatatgaaatcatcatttgaaaattctgtaacagctccagcaggcaaccaaggacacggtttagataaaagtgaatttgataagaaagctgaaattaactttaaagatggatcaaaagctacaatgaaaacaggtgatattgcaatagcagcaattacatcatgtacaaatacatctaacccttatgtaatgttaggtgcaggtttagttgctaaaaaagcagttgaaaaaggcttgaaagttcctgaatacgttaaaacttctctagcaccaggatcaaaagttgttaccggatatttaagagatgctggcttacaaccttatttagatgatttaggcttcaacttggttggttatggatgtacaacttgtatcggtaattcaggtcctttattaccagaaattgaaaaagcgattgctgatgaggacctattagtgacatctgtattatctggtaaccgtaactttgaaggtcgtatccatcctcttgttaaagccaattacctagcttcaccacagttagttgttgcttatgcattagctggaacggttgatattgatttacaaaatgaacctattggtaaaggtaatgacggtgaagatgtatatttgaaagatatttggccatcaattaaagaagtttcagataccgttgatagtgttgtaacacctgaattatttattgaagaatataataacgtatacaataacaacgaattatggaatgagattgatgtaactgatcaacctctatatgactttgatcctaattcaacatacattcaaaatccatcattcttccaaggattatctaaagaaccgggtacgattgttccattaaatggtttacgtgttatgggtaaattcggtgattctgtgacaactgaccacatctctccagcaggtgcaattggtaaagatacgccagctggtaaatatttacaagatcatcaagtgcctattcgtgaatttaattcatatggttcaagacgtggtaatcacgaagtaatggttcgaggtacgtttgctaatatacgtattaaaaaccaattagcgccaggtactgaaggtggttttacaacttattggccaacaaatgaagtaatgcctatctttgatgctgcaatgaaatataaagaagatggtacaggtttagttgtattagctggtaacgattatggtatgggttcatctcgtgactgggcagcaaaaggtacaaacttattaggtgttaaaacagttattgcacaaagttatgaacgtatccatcgttcaaatttagttatgatgggtgtattaccattagagtttaaaaaaggtgaatcagctgattctcttggtctagatggtacagaagaaatttctgttaatattgatgaaaatgttcaaccacatgactacgtcaaagttactgctaagaagcaagatggtgatttggtagaatttgacgctatggttcgttttgactcacttgttgaaatggattactatcgtcacggtggaattttacaaatggttttaagaaataaattagcgcaataaaaaatagatatcacagtaaaattttaatcggtatttgaggcactttgatagtgctcaaaaatacttctataaactttatgatataataggtcggttcaaaacctttgtgttcttggccggcctcttcttgtattttatgttagaatgagatataaagttaaactgaaagaaggcttaaaatgatatatagtattacagaaatagaagcgcgttatgctgaaactgataagatgggtgtaatttatcacgggaattatgcaacttggtttgaagttgcgcggttggattatatatcgaagttaggttttagttatgctgatatggaaaaacaaggaatcatttcacctgtgactgacctcaatgtcaattataaaaagtctattttttatccagaaaaagttaaagttaaaacttgggttgaaaaatattcgagattacgttcagtgtataaatatgagatttttaatgaaaaaggtgaacttgcaactacaggttccacagaattgatttgcattaaagaagatacttttaagcctatacggttggatcgttatttcccagattggcatgaagcttatagtaaagtgcaaacgctcaataatgaagggaaaacagtagagataatggatggtattgattctttataagttactgtaaatgtttggagaggcaatattaacaattaatctataaaaaatagccaatacgttaacattaatgtaattagcgtgaagataagctaatatatagcaaaaacgaacttgttcatacaacatcagatgtgctaaaccaaagtacaacttccgaggttcaggacacatcagaatgtgtaaacaagttcgttttattttagttattttgtggaataagaaatttcatcttcgtgatcaactacatttacaataatgtggtcatcttcaaagtaccacaaatctttttccgctacgacaacatttaaatcgtcatattgttgttcatagccaatatcaacatcttcctttggttcaactgtaaaagcaggactaaatccttgcttgagttggaattcgccaccatatcttacaaaaaacacgagcactttattattttcaggcaactcaagttcatttttaaaccaagttactgctgcatcagtaagttctatttgcataacaatgacctcctatatttattacagaatgggagtgggccaacttgtattatttgtggaatttcttatcgaaattctctgtgttggagcccaccccaacctgctcattattgtaagctgaatttccataagcttctatgttgggacccccgaccagaattgaaaaaacctagttataagcgcattttgttcggttaactacagctaatataacattgtggagcctatgacattgatttatgtctcggtctcaaatgttcttgtaaaaaaactaagtatagttgaattttaagttaaaaaaattgtttttgcaaaaataaaataatccatcaactgcaaaaaaatatgcaatgatggactaatgtcaaaaaattgttacatccattttattttaggttcttcgcctctaaaaatccttgcgatattagagcgatgtctaattatcaatatgattgaaactaagaaactaacgactaataaaatatagtcttgaatgataagcgagccaatcacacagcaaattgctgcaacgatacttgctaaagaaacatatttaaaaatcttcaatacaataaagaagataattgcaagtattagtaaaagtatcggattgactcccaagacgacacctgcactagttgcaacagctttgccaccttggaattttaaataaacaggataaacgtgtccaagtatagcgaataagccaacaattaaaccatttgtaaaaaaagtactaatagggccatctgcgtgaacttgtaaccataaagggaagaaaacagttatgaaccctttgaaaatatctagaaatgttaccaagaatcctgcaggacgacctaatactctaaagctattagtagcgccagtattaccactaccaaattgtctaatatcttttttgaaaaataattttccaattacgaatccacttgggaaagcgccgataagataacttagtagtaacatgacgattatcatcataaatattacacatcctttaatatcttaggactattttatcatattcatttaaattacggctaaaaattttaaaaacggggattaatatatggaattaagctatgaaagttaattgatacttgcattttacgctgatttatataagaataactattgtatagttttaaaaacgaacgtacgtttgcaggaggcgaaatcattggcaatgaataaacaaaataattattcagatgattcaatacaggttttagaggggttagaagcagttcgtaaaagacctggtatgtatattggatcaactgataaacggggattacatcatctagtatatgaaattgtcgataactccgtcgatgaagtattgaatggttacggtaacgaaatagatgtaacaattaataaagatggtagtatttctatagaagataatggacgtggtatgccaacaggtatacataaatcaggtaaaccgacagtcgaagttatctttactgttttacatgcaggaggtaaatttggacaaggcggctataaaacttcaggtggtcttcacggtgttggtgcttcagttgtaaatgcattgagtgaatggcttgaagttgaaatccatcgagatggtaatatatatcatcaaagttttaaaaacggtggttcgccatcttctggtttagtgaaaaaaggtaaaactaagaaaacaggtaccaaagtaacatttaaacctgatgacacaatttttaaagcatctacatcatttaattttgatgttttaagtgaacgactacaagagtctgcgttcttattgaaaaatttaaaaataacgcttaatgatttacgcagtggtaaagagcgtcaagagcattaccattatgaagaaggaatcaaagagtttgttagttatgtcaatgaaggaaaagaagttttgcatgacgtggctacattttcaggtgaagcaaatggtatagaggtagacgtagctttccaatataatgatcaatattcagaaagtattttaagttttgtaaataatgtacgtactaaagatggtggtacacatgaagttggttttaaaacagcaatgacacgtgtatttaatgattatgcacgtcgtattaatgaacttaaaacaaaagataaaaacttagatggtaatgatattcgtgaaggtttaacagctgttgtgtctgttcgtattccagaagaattattgcaatttgaaggacaaacgaaatctaaattgggtacttctgaagctagaagtgctgttgattcagttgttgcagacaaattgccattctatttagaagaaaaaggacaattgtctaaatcacttgtgaaaaaagcgattaaagcacaacaagcaagggaagctgcacgtaaagctcgtgaagatgctcgttcaggtaagaaaaacaagcgtaaagacactttgctatctggtaaattaacacctgcacaaagtaaaaacactgaaaaaaatgaattgtatttagtcgaaggtgattctgcgggaggttcagcaaaacttggacgagaccgcaaattccaagcgatattaccattacgtggtaaggtaattaatacagagaaagcacgtctagaagatatttttaaaaatgaagaaattaatacaattatccacacaatcggggcaggcgttggtactgactttaaaattgaagatagtaattataatcgtgtaattattatgactgatgctgatactgatggtgcgcatattcaagtgctattgttaacattcttcttcaaatatatgaaaccgcttgttcaagcaggtcgtgtatttattgctttacctccactttataaattggaaaaaggtaaaggcaaaacaaagcgagttgaatacgcttggacagacgaagagcttaataaattgcaaaaagaacttggtaaaggcttcacgttacaacgttacaaaggtttgggtgaaatgaaccctgaacaattatgggaaacgacgatgaacccagaaacacgaactttaattcgtgtacaagttgaagatgaagtgcgttcatctaaacgtgtaacaacattaatgggtgacaaagtacaacctagacgtgaatggattgaaaagcatgttgagtttggtatgcaagaggaccaaagtattttagataattctgaagtacaagtgcttgaaaatgatcaatttgatgaggaggaaatctagtgagtgaaataattcaagatttatcacttgaagatgttttaggtgatcgctttggaagatatagtaaatatattattcaagagcgtgcattgccagatgttcgtgatggtttaaaaccagtacaacgtcgtattttatatgcaatgtattcaagtggtaatacacacgataaaaatttccgtaaaagtgcgaaaacagtcggtgatgttattggtcaatatcatccacatggagactcctcagtgtacgaagcaatggtccgtttaagtcaagactggaagttacgacatgtcttaatagaaatgcatggtaataatggtagtatcgataatgatccgccagcggcaatgcgttacactgaagctaagttaagcttactagctgaagagttattacgtgatattaataaagagacagtttctttcattccaaactatgatgatacgacactcgaaccaatggtattgccatcaagatttcctaacttactagtgaatggttctacaggtatatctgcaggttacgcgacagatataccaccacataatttagctgaagtgattcaagcaacacttaaatatattgataatccggatattacagtcaatcaattaatgaaatatattaaaggtcctgattttccaactggtggtattattcaaggtattgatggtattaaaaaagcttatgaatcaggtaaaggtagaattatagttcgttctaaagttgaagaagaaactttacgcaatggacgtaaacagttaattattactgaaattccatatgaagtgaacaaaagtagcttagtaaaacgtatcgatgaattacgtgctgacaaaaaagtcgatggtatcgttgaagtacgtgatgaaactgatagaactggtttacgaatagcaattgaattgaaaaaagatgtgaacagtgaatcaatcaaaaattatctttataaaaactctgatttacagatttcatataatttcaacatggtcgctattagtgatggtcgtccaaaattgatgggtattcgtcaaattatagatagttatttgaatcaccaaattgaggttgttgcaaatagaacgaagtttgaattagataatgcagaaaaacgtatgcatatcgttgaaggtttgattaaagcgttgtcaattttagataaagtaatcgaattgattcgtagctctaaaaacaagcgtgacgctaaagaaaaccttatcgaagtatacgagttcacagaagaacaggctgaagcaattgtaatgttacagttatatcgtttaacaaatactgacatagttgcgcttgaaggtgaacataaagaacttgaagcattaatcaaacaattacgtcatattcttgataaccatgatgcattattgaatgtcataaaagaagaattgaatgaaattaaaaagaaattcaaatctgaacgactgtctttaattgaagcagaaattgaagaaattaaaattgacaaagaagttatggtgcctagtgaagaagttattttaagtatgacacgtcatggatatattaaacgtacttctattcgtagctttaatgctagcggtgttgaagatattggtttaaaagatggtgacagtttacttaaacatcaagaagtaaatacgcaagataccgtactagtatttacaaataaaggtcgttatctatttataccggttcataaattagcagatattcgttggaaagaattgggacaacatgtatcacaaatagttcctatcgaagaagatgaagtggttattaatgtctttaatgaaaaggactttaatacagatgcattttatgtttttgcgactcaaaatggcatgattaagaaaagtacagtgcctctatttaaaacaacgcgttttaataaacctttaattgctactaaagttaaagaaaatgatgatttgattagtgttatgcgctttgaaaaagatcaattaattaccgtcattactaataaaggtatgtcattaacgtataatacaagtgaactatcagataccggattaagggcagctggtgttaaatcaataaatcttaaagctgaagatttcgttgttatgacagaaggtgtttctgaaaatgatactatattgatggccacacaacgcggctcgttaaaacgtattagttttaaaatcttacaagttgctaaaagagcacaacgtggaataactttattaaaagaattaaagaaaaatccacatcgtattgtagctgcacatgtagtgacaggtgaacatagtcaatatacattatattcaaaatcaaatgaagaacatggtttaattaatgatattcataaatctgaacaatatacaaatggctcattcattgtagatacagatgattttggtgaagtaatagacatgtatattagctaaaaactatatgcaatcacgaaattaaatgataaaatacagtaatgttaaattttgactaaattcaagggatttatattaaatgctgaccaagtacttatcgttaaattagcgatatactttgaccaaactaatataaatctcttgtattgtataagaaatgatgatgtatctctatatttactgaaggttcaattcggtctaattttatagaaggtacatgattcatgtagaggatgcgaggggtttattttgaaagatttcgatagtttaatacctggatggtttaaagaatttgtccatgttggtaccgatttaatatggtctcaatatttaattggtctattattgacagctggattcttctttacgattagttctaaattcgttcaattacgaatgttacctgaaatgtttagagctttagtagaacgtccagaaactttagaagatggtaagaagggtatttcgccattccaagcatttgcgattagtgctggttcgagagttggtactggtaatattgctggtgttgcgactgcgattgttttaggcggtccaggtgcagtattttggatgtgggttattgcatttataggtgcagcgagtgcatttatagaagcgactttggctcaggtttataaagtacatgataaagatggtggattccgtggtggtccagcttactatattactaaaggtttaaatcaaaaatggctaggtatcgtatttgcgattttaattacaattacatttgcatttgtatttaacacagtgcaatctaatacaattgcggagtcgttaaatacgcaatataatattagtccagtaatcacaggtattattttagcaatcgtaacagctattattatatttggtggtgtacgtagtattgctacgttatcttcgttaattgtaccgattatggctatcatttacattggtatggttttagtaatattgctatttaatttagatcaaattgttcctatgataggtacgattattaaaagtgcatttggtatcgaacaagtaactggtggcgctgtaggtgctgcggttcttcaaggtatcaaacgtggtttattctctaacgaagctggtatgggttctgcgccgaatgcagcggcaactgctgccgtaccacaccctgttaagcaaggtttaatccaatcattaggtgtgttctttgatacaatgttggtttgtacagcaactgcaatcatgattttactatattcaggactgaaatttggtgataacgcacctcaaggtgttgcagttactcaatcagcacttaatgagcatttaggttctgctggaggtattttcttaacaatagcagttacactgtttgcattttcatctgttgtaggtaattactattacggtcaatctaatattgaatttttatcaacaaaccgtgtaatattatttatctttagatgtcttgttgtagtacttgtctttgtcggtgcagttgtaaaaacagaaacagtatggaatacggcagacttatttatgggcttaatggcaattgtaaacattatttccattataggactgtccaatgtagcttttgcattgatgaaagattatcaaaagcagaaaaaagaaggcaagaaccctgtctttaaacctgaaaacttagaaattaacttatttggaattagtgcttggggcgctaacaaatataagaactctgataaataaatatttttaatgtaacgattcattatataaaaatcaaataaaccctgaggttttcaaattaaagcgaaaatctcagggttttaaatttgtactcaattatcatctgtatcattacactagttaatctaagatttgattatatattaatatagtaaggttgagatttatttcctccattggtgtgcaaagactataccattgataagacatattgttggatagatgaatataaatttgttttagctttgcacaatttaatagtacgttttagtttgtattgagtattaattcagataatatataaataaatagaattatttgtaaatatgggagtcagatttttttattatagttattccactttgagagacatcgaaattaaattaagatatatcatataggataggcgtgtaatagaacacaagtatttaaattattatactttcaagttagacatttccgatatataatcttaataatagaaaaataggtgatgataatgggagaatatattgttactaaaacattgaacaacaatgtcgtagtatgtactaataatgatcaagaagttattttaatcggtaaaggtattggttttaacaaaaaagagggaatggcgttaaacgaccaaactattacaatagagaaaatttataaattagaaagtgagcaacaaaaagcacattataaaagtttagttgaaatcgctgatgataatgtattacaagtaattattgattcgttgaattttatttctaatactgcgatgaatgttgattcaaaacaacttgtagtttcattaacggatcatattatatttgcttataaacgcttaaaacaaaatcaagttattagcaatccatttgttatggaaactatgcagttatatagtgatgcatatcatattgctaaacaggtgattgatcagttaaatgcagcattagatgtacattttcctgaagatgagataggatttattgcattacatattgcatctaatacagaagatttatctatgcatgagatgaccttgatcaataatgttattaaaaaaggtatagatatcattgaatcagaccttgtgacaactgttgataaggaatcattacaataccaacgttttataaggcacgtacaatttttaattcgccgattaagaagaaaagaatatatacatgcacaagatgattttgtgtctatgattaaaaatcactatccgatttgctataacacagcatataaaattttaactatgatacaaaaacaatttgatgttaatatcagtgagtctgaaattatatatttaacattacacattcatcattttgaagaaaggattaatcaatcctaaattaagtgtattacacgggcgtttcgttactgtaaagggtatttgtatggtatcattgatgttagtaattttacataagtggactgtttttatacaacatcttatgaatattttaagtggtggtgaatctataattgaatgaaaatgaaaagaatataagaaagaattttttaaaatttaccgaatcacggtatatgaagtttgttggtgggaatgatttagtcttctcattaatagcgctagtattgttgggtattgttatttttattttcgaaaaagtatcatatgtttttgatccttttatcatcgtttttaagacgatagcagcacctatcatcgtctctttaattctattctatctatttaacccaatcgtaaatatgatggaacgttatagaataccaagagttgcaggtatttctattatttatctagctgtagtaggtgttattacgttaattgttaatttattgatacctattattggttcgcaagtagatagtttagttaaaaattcaccgcaatatctagaaaaattaattaattctattgataaaatagcaaataatacgtttttctcttcgtattatagtcaaattaatgattggttaaattctttacctaagaaaataccatctatgttaagtgaatttacagatggctttgggtctaaaattgcaacgtttgcagaaacgattgctaatattggcgttgtgattgtcacaacaccatttgtactattctttatgcttaaagatggacatcacttcaaagaattttcaacgaatattatgccaccgaaattccgaaaagattttcatgatctacttgaaaaaatgagtgttcaagttggttcatacattcaaggacaaattatcgtttcattctgtatcggtatactgttgtttatcggttattcggttatcgggttgaaatatagcttagtattagctagtattgcggcagttacaagtgttgtaccatatttagggcctactatagcgatttctccagctattgtaatagctgctataacatcgccgtggatgctcttaaaattagcagtagtatggactttagtacaatttgttgaagggcacttcatttcaccaaatatcatgggtaaaacacttaagattcatccacttacaatcattttcattttactgtgtgcaggcaaattgcttggtattgtaggcgttattttaggtattccgggatatgctattttaaaagtattagttactcatttattccaattatttaaacgtcgatacaatcgtttctatggtaatgatgtaggtgaatatgatattaaagaaagtaataaaatagttgaataagtaataaaaaataccaatgactatatgtttgttggtattttttatggtgcttataatgttgggcagttacatttatgattatcagcacatgtttagcttataaatttttacgaaagtttagccgtttataaagcacatgcataatgaaacgagtatttgccacttgattagtacttcattattatgtcgaaaataaaaataagtggtatttttaatatattaagaagcactcataatcggctgttaattaataatatttttcataagtattgattcatcattttctttatgttaaatatgaatcagtatagataaccatattgttctgtttgagatagaaatattttctatttacttcttaatacagatatcaatatgacaaaagtgttatataaatcaaaggtaaatgatatgctatttttatggtttatatgatatattttgatttataacagaaataattagaattgatgtgaaaaaatgaatcaggaagttaaaaacaaaatattttcaatcttaaaaattacgtttgctacagctttatttatttttgtagcaatcacattgtatcgggagttatctggtattaactttaaagatacgttggttgaatttagtaagattaaccgtatgtccttagtgttactatttattggtggtggggcatcgcttgttattctatcaatgtatgatgtgattttatctagagctttaaaaatggatatatccttaggcaaagttttaagagtaagttatatcatcaatgcattgaatgcgattgtaggtttcggtggctttattggtgcaggcgttagagcaatggtttataaaaactatacgcatgataaaaagaaattagttcactttatatccttaatacttatttcaatgttgacaggtttaagcttattatcattgctaattgtattccatgttttcgatgcatctttaatcttagataagattacatgggtaagatgggtattatatgtagtgtcatttttcttaccattattcattatttattcaatggttagaccacccgataaaaacaatcgttttgtaggattgtactgcactttagtgtcgtgtgttgaatggttagcagctgcagttgtattatatttctgtggtgtaattgttgacgctcatgtatcattcatgtcctttattgcaatatttatcattgctgcattatcaggtttagtcagctttattcctggtggtttcggcgctttcgatttagttgtattactaggatttaaaactttaggtgtccctgaggaaaaagtattattaatgctacttctatatcgttttgcgtactattttgtaccggtaattattgcattaattttatcatcatttgaatttggtacatcagctaagaagtacattgagggatctaaatactttattcctgctaaagatgttacgtcatttttaatgtcttatcaaaaggatattattgctaaaattccatcattatcattagcaattttagtattctttacaagtatgatcttttttgtaaataacttaacgattgtttacgatgctttatatgatggaaatcacttaacgtattatattctattggcaattcatactagtgcttgtttattacttttactgaatgtagttggtatttataagcaaagtagacgtgccattatctttgctatgatttcaattttattaatcacagtggcgacattcttcacttacgcttcatatattttaataacatggttagctattatttttgttctgcttattgtagctttccgtagagcacgtaggttgaaacgcccagtaagaatgagaaatatagttgcaatgcttttattcagtttatttattttatatgttaaccatatatttattgctggaacgttatatgcattagatatttatacgattgaaatgcatacatctgtattgcgctattacttctggcttacgattttaatcatcgctatcatcataggtatgattgcatggttgtttgattatcaatttagcaaagtacgtatttcttctaaaattgaagattgcgaggagattattaatcagtacggcggtaattatttgagtcacttgatatatagtggtgacaagcagtttttcactaatgaaaataaaacagcatttttaatgtatcgttataaagcaagttcattagtggttcttggagatccgttaggtgatgaaaatgcctttgatgaattgttagaagcattctataattacgctgagtatttaggctatgatgttatattctatcaagttacagatcaacacatgcctttatatcataatttcggtaaccaatttttcaaattaggtgaagaagcaattattgatttaacgcaattttcaacttcaggtaaaaaacgccgtggatttagagcgactttaaataaattcgatgaacttaatatttcgttcgaaattattgaaccaccgttttcaactgaatttataaatgaacttcaacatgtaagtgatttatggctagataatcgtcaggaaatgcatttctctgttggtgaatttaatgaagaatacttatctaaagcgccaattggtgtaatgcgaaatgaagaaaatgaagtaattgcattttgtagtttaatgccaacatactttaatgatgccatttcagtcgatttaattagatggttgccagagttagatttaccattaatggatggtctatacttgcatatgttactttggagtaaagaacaaggttatacaaaatttaatatgggtatggcaacgttatcgaacgttggtcaattgcattattcatatttaagagaacgacttgcaggccgtgtctttgaacatttcaacggtctatatcgtttccaaggattacgtcgttataaatctaaatataatccgaattgggaaccacgctttttagtttatcgtaaagataattcgctttgggaatcactttctaaagtaatgcgtgtaatacgtcacaaataattaaaatccaagtgctaagaggtatacagttatgcctgatgcgcttggattttttggtttctataaagaatgatttataaaaaacggtacagataagaatatttaagtttcctatctgtaccgtattttaatattgaaatgagctaaagttaagtcgcctaacttttattatcagtccaatcagtttcatcaagtataaatgttattgcttatttttgtattcttggcgtattttttgttcttctgcatagcgctctggatttttcttataaaaatcttggtgatagtcttcggctttgtaaaattgtgacgctggtaatatttttgttgcaattgccttatcagcattaatcgtatttttaagctgctcgatataagtctcagcgagttctttttgatgatcattagtgtagaaaatagctgtttgatattgaggaccacggtcttgatattgaccacctgtatctaatgggtcaatgactgagaaaaatatttctaataacttattgtatgagaataatgcaacatcatattgaatttcaacagtttctaaatgaccactcgtacctgattttacttgttcgtaagtaggattttcaatatgtccgcccatatatccagaagttactttttctatgccgtcaaaggtgtcaaatggtttcgtcatacaccaaaagcaacctccggcaaaataagctgtattaatattcatttttgacatcctttcattagaccttagtacgatttattaagaaatcacttgctttttgaattgtttttatataacgttaatatgtgattattatagtacacaaaaatctatttttgaagatataaggtaggtaaatatggataaagaaactaatgacaacgaatatagacgtcaaagtgaacatcgcacttcggcgcctaagcgaaaaaagaagaagaaaattaggaaattacctatcattcttctgattgttgtaattttacttatcgcattagttgtatatattgtacatagttacaatagcggtgtagaatatgccaagaaacatgcgaaagatgttaaagtacatcaatttaatggaccagtaaaaaatgatggtaaaatttctattcttgtactcggtgcagataaagcacaaggtggacaatcaagaacagattctatcatggttgttcaatatgactttatcaataaaaagatgaaaatgatgtctgtcatgcgtgatatttatgcagatattccaggatatggaaaacacaaaattaattcagcatacgctttaggtggtccagagctacttagaaaaacacttgataaaaatttaggaattaatcctgaatattatgcagtagttgattttactggatttgagaaaatgattgatgaattaatgcctgaaggtgtaccaattaatgtcgaaaaagatatgtcgaaaaatattggtgtatctttgaaaaagggtaaccataggttgaatggtaaagaattacttggttatgcaagattccgtcacgaccctgaaggtgacttcggacgcgtgcgacgtcagcaacaagtgatgcaaacattgaaaaaagaaatggttaattttagaacagttgttaaattaccaaaagttgcaggtattttaagaggctatgtgaatacaaacattcctgattcagggattttccaaacaggtttgagttttggtatccgaggtgaaaaagatgttaagtcattgactgtgccaatcaagaactcatacgaagatgtcaatacaaatactgatggtagtgcattacagattaataaaaacacaaataaacaagctattaaagactttttagatgaagattaaaaataaacaaggcgatttctatcatactcagatagaagtcgccttgttcgttttcaaagaattaattggcatgcatcttatgaagaattattgatctgactttcttacgccagccacaccataatggtttggtttcatttcttctataacaacgtgaattgcttgtctatttgcccccgttgttttttctacggcgtcagttacttcgctaactaaattttttaattgttcatccgaacgaccttctaataattttacattgacgattggcatcatccaaacctcctaatcattattaatttgagtatatcatgtaatacttaaaaattcatttgcaaaataacagaacatttgttctaaaatagttgaaatagaacacgtgttcgtatataataagattcaagtaagggaggaataacagtgtataattatcatttattagaagatagggatgttctatgtattgaccaaaaaagtttttttgcgagtgtttcttgtattgaaaaggggctagatccattagaaacaaagctagctgttgttgcagatactaagcgtcagggttctgtaatattggctgcgacacctaaattaaaagaattaggcatcaagacagggtcgcgattgtttgaaataccacatagaaatgatatttacattatcaatccaagtatgcgtaaatatcttaatgtttcagttgctatttctaagattgcattgcgttatattccacctgaagatttacaccaatatagtattgacgaattttttatggatgttactgatagctatcatagatttagttctacagtacatgcattttgcgaaagacttaaacgtgaaatttatgaagaaacaggcatttattgtactgtgggcattggttctaatatgttattaagtaaaattgctatggatgttgaagcgaagcatagtcaaaatggtatagctgaatggcgatatcaagatgtaccaacgaaattatggccaattcagcccttgcgagatttttggggtattaatcgtcgaacagaagccaaattgaataaaagaggaatttttactataggagatttagcgaaatatccatataaatttttaaaaaaagagttcggtattttaggtgttgatatgcatctacatgcgaatgggatagatcagagtaaagtacgtgaaaagcacaagatcagcaatccatcgatatgcaaaagtcaaatattaatgagagattatcattttgatgaagcaaaagtagtaatgcaagagttaattgaagatgttgctagcagagttcgagcaagaaaaaaagtggcaagaacgatacattttgcctttggctatagtgatgaaggcggtgtacataagcaatatactttgaaagatccaacaaacttagaaaaagatatttataaagtagtaatgcatttcgcagataaattatgtaataaacaagcactatatcgtacgctaagtatatctttgagtcaatttattaatgaggatgagcgacagttaagtctgtttgaagatgaataccaacgcaaacgtgacgaatgtctagctaaaacgatagaccaattacatttgaaatacggcaaaggtattgtgtccaaagcagtatcgtttacagaagcaggtacaaaacacggcagattaggtttaatggctggacataaaatgtaatgactatacggtttaagtaatatataactgtgattcgtataaaataagtctctaaagataaatatttcatatatcacaatagattttcacaataatatctaagaatacatggaatttatcaaaagagacttaataattattggatataacaatcaaaatcactcaatgcttgcataccgcgttctcggtcagtagggtttttgaaactaatttttaaagcaccgtatatatcttcgcgtacttctaagattcttaagttgcttatagatatgttatgtaaactcaggatataagtcactttacttatcatacctgattcatccggaatgtctacatatagatcatacgcagtatttagtccacctagttgtttagcgggtagtgcgtcgcgatacgatttagcttgggcaaaaaatgataacaatttttcagaatcattgctttcaattagtctttctaaatcttgaaactgactttttagctgtcgaatcatttctaaaatatacgttttattactcaaggtgatatctttccacatttgtgcattactactagctatacgagtgatatcacgaaaaccaccagctgcaagtttattaactaaatgatgttcttgaccgttcttttgactaacatgaactaaactagatgcaacgatatgaggtaaatgacttacgacgcttgttacgtagtcgtgttcttcagcagtagttacaataaatttagcaagagtaggtgataacagttcttttaacgtgtttgctgcttgctcatttcttggctcattgtagactaaaatataataagcgttttcaaataagtgctttttagcatttagtacaccagatttatgactaccagccattggatgaccactgactaaatgaatattatgctttaataaattgcattcgtgttgctgtatcattgctttagtactaccagtatcagaaacaataacaccaggtttagttggcatatctataagctcgctaagatatttatttgtgatagcaacaggtgttgcataaataattacatcggcttttttaatagcttcactataatttaaacatttttcattaataatgccgattgatttagctttatctaactgagaagtatctgcatcgtatgcaataatattagtattagggttatggtattttatattgctagcaagacttccaccaattaatccaagcccaacaaataaaactgttgtcatataaatcaccttatttcgaaattttcagaataataacattgtaaatgagctgttgacacagtgcaatagtaaataaaaatcgataatagcattaatagataaacggagataaatcatctacaataaagagtatagtaacacaatggcaacggaggggtaaatcaatggaaccaatattagaaatgattaaaacattaacaggtattaatagtccttcaggagacacagaagaagcaattcaatttgtcgaaaaatatgcaaaagacttgggttatcaaacaacactaacaaataaaggtgcgttattaataacagtgccaggcaaaaatgatgaagtacaacgctgtattactgctcatgttgatactttaggtgcaatggttaaagaaattaaagaagatggtcgcttagcaatagaattaattggaggattcacgtataacgcgattgagggtgaatattgccaaattaaaactgatgctggtcaaatatatacaggaacaatttgtctgcatgaaacaagtgttcatgtatatagaaataatcatgaaatacctagagatcaaaagcatatggaaataagaattgatgaagtaactacatcagaagaagatacaaagagtttaggtatttcagtaggtaattttgttagctttgatccacgtacagttatcacgtcatcaggttttattaaatctcgtcatttagatgataaagctagcgtagcgatgatactacaattactaaagaaattaaaagaagagcaaataatattaccacatacaacgcaattttatatttctaataacgaagaaataggttacggtgcaaatgcatcaattgattcgaaaatcaaagaatatattgcattagatatgggcgcgttgggagacggtcaagcatcggatgaatatacagtttctatttgtgccaaagatgcttcaggtccatatcataagcaattgaaatcgcacctagttaatctttgcaaaataaataacattccatataaagtagacatatatccatattatggttcagatgcttcagcagctttacatgctggtgcggatatcagacatggtttatttggcgctggcattgaatcatctcatgcaatggaacgaacacatattgattctattaaagcgacagagaaattactatatgcatattgcttatcaccaattgagtaaacaattagtgttgacaaatgtgaacgacctatgtaatataatgaactataaaaataattagaattttctaaagaaatagtagcagatatgaaacgtagcaaatagaaagctaatgggtgatgggaattagcacgccatatcttgtgaattggactttggaaaacaattgaatgagttttgaaagtgaacatgaattatgttaactaaggtggcaccacggtaacgcgtccttacaggtatatgcgttatgtggtgtctttttatttagacaaaatgtagtagttaattaaaggtagcaacagaaagttagtggatgatgtgaactaacaccgagattaatgaaattgggttttgtctgcaacagaaaaattatatatagtaaagagtgaactatgaatatttcgaatattcggttaatttaggtggtaccacgcgtcagcgtcctttatattgataaggatgctggcgcttttttgaaaggagcgtatagaatggatatattttataaaaaaataaaagcaaatgtaacgcccgaagttttagcacaacttcattccaagaagatcattttggaaagtacaaatcaacaacaaactaaaggtcgctattcagttgttatttttgatatttatggcactttaactttagataatgatgtattatcagtaagtactttaaaagaatcgtatcaaatcactgaaagaccgtaccattatttaacgactaaaataaatgaagactaccataatattcaagatgagcaacttaagtcattaccatttatatctggatatgttgggacgtgtagctttgatttagtaagacatgaatttcctaaattgcaatcaatacaattagaagatcacaagcagcacgatgtaaggttatatatggttgaacaagtttatgtatttgaccattacaaagatgagttatatatcatcgcgacgaatcaattttcaaattcaacaaaatcagatcttgagaatcgagttattaagtctatcgaagacttaactaaaatccaaccattcatgcctacacaagattttgattttaaaactaaagaaattcaatcaaacatttctgaagaaagatttatcgaaatgattcagtatttcaaagagaaaataacagaaggggatatgttccaagttgtgccatcaagaatttacaaatatgcgcatcatgctagtcagcatttaaatcaactttcgtttcaactgtatcaaaatttaaaacgacaaaacccaagtccatatatgtattatcttaatatcgatcaaccatatattgtcggtagttctcccgaaagtttcgtaagtgtcaaagatcaaattgtaacaactaatcctattgcaggtacgattcaacgtggtgagacgacacaaatagataatgagaatatgaaacaactacttaatgatccaaaagaatgcagcgaacatcgtatgctagttgatttaggacgtaatgatattcatagagtaagtaaaatcggtacctcaaaaattactgaattaatggttattgaaaaatatgaacatgttatgcatatcgtaagtgaagtcacaggtaaaataaatcaaaatttatcgccaatgacagttattgcgaatttattaccaacaggtaccgtttcaggtgcaccaaaattacgtgcaattgaaagaatatatgaacaatatccacataaacggggcgtttatagtggtggtgttggatacataaattgtaatcataacttagattttgcattagcaattcgaacgatgatgatagatgagcagtatatcaacgtagaagctggttgtggcgttgtatatgattctattcctgaaaaagaactgaatgaaacgaaattgaaagctaaaagcttattggaggtgagcccatgatcttagttgtagataattatgattcctttacatataacctagtggatattgttgctcaacatactgacgtcattgttcaataccctgatgatgataatgtgctgaatcaatcggtggacgctgttattatatctcctggtccagggcatccattagacgatcaacagttaatgaaaatcatatcaacctatcaacacaaacccattttaggtatttgtttaggggctcaggcactgacttgttactacggtggagaagtcattaaaggcgacaaggttatgcacggcaaagttgatacactaaaggttatatcgcatcatcaacatctgttatatcaagatataccagaacagttttcaattatgagatatcattcattaataagtaaccctgacaattttccagaagaattgaaaattactggacgtaccaaagattgtatacagtcattcgagcataaagaaagaccgcattatggtattcagtaccatcctgaatcatttgctacagactatggtgtcaaaataattacaaatttcattaatctagtgaaggaaggatgaaaaccatgacattactaacaagaataaaaactgaaactatattacttgaaagcgacattaaagagctaatcgatatacttatttctcctagtattggaactgatattaaatatgaattacttagttcctattcggagcgagaaatccaacaacaagaattaacatatattgtacgtagcttaattaatacaatgtatccacatcaaccatgttatgaaggggctatgtgtgtgtgcggcacaggtggtgacaagtcaaatagtttcaacatttcaacgactgttgcttttgttgtagcaagtgctggcgtaaaagttataaaacatggtaataaaagtattacctcaaattcaggtagtacggatttgttaaatcaaatgaacatacaaacaacaactgttgatgatacacctaaccaattaaatgaaaaagaccttgtattcattggtgcaactgaatcatatccaatcatgaagtatatgcaaccagttagaaaaatgattggaaagcctacaatattaaaccttgtgggtccattaattaatccatatcacttaacgtatcaaatggtaggcgtctttgatcctacaaagttaaagttagttgctaaaacgattaaagatttaggtagaaaacgtgcaatcgttttacatggtgcaaatggtatggatgaagcaacactatctggtgataatttgatatatgaattgactgaagatggagaaatcaaaaattacacattaaatgcgactgattatggtttgaaacatgcgccgaatagtgattttaaaggcggttcacctgaagaaaatttagcaatctcccttaatatcttgaatggtaaagatcagtcaagtcgacgtgatgttgtcttactaaatgcgggtttaagcctttatgttgcagagaaagtggataccatcgcagaaggcatagaacttgcaactacattgattgataatggtgaagcattggaaaaataccatcaaatgagaggtgaataatatgacgattttatcagaaattgttaaatataaacagtcacttttacaaaatggctattatcaagacaaacttaataccttgaaaagtgtgaagattcagaataaaaaatcttttataaacgcaattgagaaagaaccaaagctagcaattattgcagaaattaaatcgaagagtcctacagttaatgacttacctgaacgagatttatcgcaacaaatctcagattatgaccaatatggtgcaaatgccgtgtccattttaactgatgaaaagtactttggtggtagttttgaaagattacaagcattgacgacaaaaacaacattacccgtattatgcaaagactttattatagacccgcttcaaattgatgttgctaaacaagctggtgcatctatgattttattgatcgttaacatcttatctgataaacaattgaaagatttatataactacgctatatcgcaaaatctagaagtgttagttgaagtacatgatcgccatgaattagaacgtgcctataaggttaatgctaaattgattggtgtaaataacagggacttaaaacgatttgttacaaatgtggaacatacaaatactattttagaaaataaaaaaacaaatcattattatatttctgaaagtggtattcacgatgcatctgatgtaagaaaaatcttgcatagtggtatcgatggcttactaataggtgaggcgcttatgcgttgtgacaatctatctgaatttttaccacaactgaaaatgcaaaaggtgaagtcatgatgaaattgaaattttgtggctttacatcaataaaggatgttacagcggccagtcaattacctattgatgcgataggtttcatccattatgaaaaaagtaaaaggcatcaaacaattacccaaataaaaaagttagcgtctgctgttccaaatcatatcgataaagtatgtgtcatggtaaatcctgatttaacaacaattgaacacgtattaagcaatacgtcaattaacacaatacagttacacggcacagaatctattgattttatacaggaaattaaaaagaaatattcaagcattaaaatcactaaagctttagctgcagatgaaaacataatccaaaacataaataaatataaagggttcgtagatttatttattatcgacacaccctcagtgtcgtatggtggtaccggtcaaacatatgactggactattttgaagcacataaaagacataccttatttgatagcaggaggcattaactctgaaaatattcaaacagttaatcaacttaaattatcacatcaaggttatgatcttgcatcaggtatagaagtaaatgggcgaaaagatatagaaaaaatgacagcaattgtaaatattgtgaaaggagatagagacaatgaataaacaaatacaaacagaagcagatgaattaggtttctttggtgaatatggagggcaatatgttccagaaacattaatgccagcaattattgagttgaaaaaagcttataaagaggcaaaagcagacccagagtttcaaagagaactggaatactatttatcagagtatgtaggacgcgcgacaccacttacatatgctgcatcatatactgaaagcctaggtggcgctaaaatatatttgaaacgagaggatctaaatcatacaggcgcccataaaattaataatgcgttaggtcaagcgttgcttgctaaaagaatgggcaagaagaagcttgttgctgaaactggtgcgggtcaacatggtgtagctagtgctacggttgctgcattatttgatatggaacttgttgtctttatgggaagtgaagatattaaaagacaacaacttaatgtatttagaatggaattacttggtgcaaaggttgtggcagttgaagatggtcaagggactttatcggatgcagttaataaagcattgcaatattgggtaagtcatgtagatgatacacattatttattaggttctgcattaggtccagacccgttcccaacgattgttagagattttcagagtgtgattggtaaagaaataaaatcacagatattgaagaaagaaggtcgacttccggatgcaattgtagcatgtatcggtggtggctcaaatgcaatcggtacattttatccatttattaaagatgatgttgcattatacggtgttgaagccgcaggtcaaggcgatgatactgataaacatgcacttgcaattggcaaaggatcacctggcgtattacatggtactaaaatgtatttaattcaagatgaagatgggcaagtgcaactagcacattctatttcagcaggacttgattatcctggtattggaccagaacattcttattaccacgacattggtagagtaacttttgaaaatgctagtgatacacaagcaatgaatgctttaatcaactttacaaaacatgaaggtattatacctgcaattgaaagtgcacatgcactgagttatgttgaaagactagcgcctacgatgtcgaaagaagatattattgtagtaactatttctggacgtggcgataaagatatggaaacaattagacaatatatggtagagcgaggtcttgcaaatgactaaattatttataccttatattatgggcaataaagatttgattgaaaatgcaacattgttgagtgaaaatggtgcagatataattgaaattggagtacctttctctgatccggttgctgatggtccagttatcatggaagcaggtcaacaagcgattaaacaaggcatcacgatagattatattttcaatcaattagaaaaacatggtgatcaaattaagtgtaactatgtattaatgacgtattataatattatttgtcattatggagaacaagcgttttttgaaaaatgtcgagatactggtgtctacggcttaattattcctgatttaccatatgaattatcgcagcgtttaaaacaacaatttagtcactatggcgtcaaaatcatatcgttagttgcgatgactactgatgacaaacgtataaaagatatcgtatcccatgcggaaggctttatttatactgtgacgatgaatgcgacaacagggcaaaacggtgcgtttcatccagaattaaaacgaaaaattgagtcaattaaagcgatagccaatgtgccagttgtcgcaggatttggtataagaacaccacaacatgttgcagatataaaagaggttgcagatggcattgtcattggtagcgaaatcgttaagcgatttaaatctaacacgcgtgaggaaatcattaaatatttacaatctatccaacaaacattgaataattaagtttacttgatttaaaaaaattaggcgaatactgtttgaaaaagtgaaaaacggtgaattataaaattgaatagaaatgatacaaaagtaatatgagcaaacccaaacgttcatattactttttttgaaattgtattcaaaaatctaaatattactataaaagtatacgcaattaaagcgtttatgttttagttttaacattaactattgtatacttatttagattagatttattatttttgacatttgcagaggggaaatagaaaaactgcaaatacggaaatgaaattaattaacgagagacaaataggagtaatgataatgaagtttacaaatttaacagctaaagagtttggtgcctttacagatagcatgccatacagtcatttcacgcaaactgttggccactatgagttaaagcttgctgaaggttatgaaacacatttagtgggaataaaaaacaataataacgaggtcattgcagcttgcttacttactgctgtacctgttatgaaagtgttcaagtatttttattcaaatcgcggtccagtgattgattatgaaaatcaagaactcgtacactttttctttaatgaattatcaaaatatgttaaaaaacatcgttgtctatacctacatatcgatccatatttaccatatcaatacttgaatcatgatggcgagattacaggtaatgctggtaatgattggttctttgataaaatgagtaacttaggatttgaacatactggattccataaaggatttgatcctgtgctacaaattcgttatcactcagtgttagatttaaaagataaaacagcagatgacatcattaaaaatatggatggacttagaaaaagaaacacgaaaaaagttaaaaagaatggtgttaaagtaagatttttatctgaagaagaactaccaatttttagatcatttatggaagatacgtcagaatcaaaagcttttgctgatcgtgatgacaaattttactacaatcgcttaaaatattacaaagaccgtgtgttagtacctttagcgtatatcaactttgatgaatatattaaagaactaaacgaagagcgtgatattttaaataaagatttaaataaagcgttaaaggatattgaaaaacgtcctgaaaataaaaaagcacataacaagcgagataacttacaacaacaacttgatgcaaatgagcaaaagattgaagaaggtaaacgtctacaagaagaacatggtaatgaattacctatctctgctggtttcttctttatcaatccatttgaagttgtttattatgctggtggtacatcaaatgcattccgtcattttgccggaagttatgcagtgcaatgggaaatgattaattatgcattaaatcatggcattgaccgttataatttctatggtgttagtggtaaatttacagaagatgctgaagatgctggtgtagttaaattcaaaaaaggttacaatgctgaaattattgaatatgttggtgactttattaaaccaattaataaacctgtttacgcagcatataccgcacttaaaaaagttaaagacagaattttttaggaagggaattatcaaaacatgaaatttacagagttaactgttaccgaatttgacaactttgtacaaaatccatcattggaaagtcattatttccaagtaaaagaaaatatagttacccgtgagaatgatggctttgaagtagttttattaggtattaaagacgacaataacaaagtaattgcagcaagccttttctctaaaattcctactatgggaagttatgtttactattcgaatcgtggtccagtaatggatttttcagatttaggattagttgattattatttaaaagagttagataaatatttacagcaacatcaatgtttatatgttaaattagatccgtattggttatatcatctatatgataaagatatcgtgccatttgaaggtcgcgagaaaaatgatgccctagtaaacttgtttaaatcacatggttacgagcatcatggctttacaactgagtatgatacatcgagccaagtacgatggatgggcgtattaaaccttgaaggtaaaacacccgaaacattgaaaaagacatttgatagtcaacgtaaacgtaatattaataaagcgataaactatggtgttaaagtcagattccttgaacgtgatgagttcaatcttttcttagatttatatcgtgaaactgaagagcgtgctggatttgtatcaaaaacagatgattatttttataactttattgacacatatggagataaagtattagtaccattagcatatattgaccttgatgaatatgtgttaaagttgcaacaggaattgaatgacaaagaaaatcgtcgtgatcaaatgatggcgaaagaaaacaaatcagataagcaaatgaagaaaattgcagaattagataagcaaattgatcatgatcagcatgaattattgaatgcaagtgaattgagcaaaacggacggcccaattctaaaccttgcttctggcgtttattttgcaaatgcatatgaagtgaattatttctctggtggttcatcagaaaaatataatcaatttatgggaccatacatgatgcattggtttatgattaactattgcttcgataatggctatgatcgttataatttctatggtttatcaggtgattttacggaaaacagtgaagattatggcgtataccgctttaaacgtggatttaatgtacaaatcgaagaattaataggggatttctataaaccaattcataaagtgaaatattggttgttcacaacattggataaattacgtaaaaaattaaagaaatagatgtaaatgatgttagggcttatagttattgatactataggctcttttttatatgttttttaataaagcctcgaataatgatatattaaatgacaagtttaacaagtgattgcaataaatataaatatgaattgcacaacctatttgtaaatgattgagttgagtatactttttaattcattcaatatgactcaaaacaagccaatatgtattatatttttggtgaataaaccttagcataacaatttatgtctgattatatatgtgtgtgtttgcaagtgtgtgatatcaaatgtcatatttgtctaattgtaatttataaaatgcatgagcaatgattgctgtaacaaattctagcaaagtattcagtttgtattttagaaataaaaatgatgatagatgtatgatcgatataaaagatttaatatgcaccaaaatgataacgtgagtaattggtttaatgaaacataacatgaatgtaaatttagcttactgacataaacactacacaaacatacagttatataagtccccttatggaatttcacattctagtttacataatatatattataggaagttatatgtgtgtaacgcaaaaggtaccctacatcataatcattatctaatatcgtcacataacttacttatgctataatcatggtattatattgtttggagtgatttgatgagatttgtctttgatattgatggtacgctttgttttgacggccgattaattgaccagactattattgatacattgttacaattacaacatgatggtcatgaacttatatttgcatcagcacgtccgattcgtgatttgttgccagttttaccatcagtatttcatcagcacacattaattggcgcaaatggtgctatgatttcacagcaatcaaagatttctgttatcaaaccaattcatactgatacatatcatcatatcttcaaaataattcaaaagtatgagttagattatattattgatgatgattggaattatgctgcacaacttgacgctgagaacgcgatttttgagcgtttagatccacataagctggccagttgtattgatgttgcaaatatcgacacaccaatcaagattattttattaaatatagacccggcacaaattacaactatattagacgagctagataaataccatcaagaattggaaatgattcaccattcaaatgagtataacattgatataacagcgcaaaatattaacaaatatactgcattacaatatatatttgatgcagatgttaaatatatagcatttggtaatgaccacaatgatattgtcatgttacaacatgctagtagtggctatattataggaccatcagaagcatacacacacgcaatattgaaacttgataaaatcaaacacatcaataataatgcacaagctatttgcaaagtcttaaaatcatataaataaaaacacccctatcaaatgataatcattatcaatcgataggggctattttaataaaattcgtcctcgaacatttcttcctcttcatctaatccaaataattctgccatttctccatgttcaattaacatgtttaaatatgcatcgcggagttcttcttcactcatatcattaatcatttctttaagactatcaatccacatatttctgcgtaattgatagtcttcttcaacttcgtttaacatcattatatgtttatttgctgcttctggactagctgtaaagagtaatgcaatcatatgtttacatatcactcgtcttccatcagcatgaggacaattacatatggattttctaggatgttccatatcaatataacaacgatatactttgttgccactgccctttacttcagcctcatgctgcgtttctgaaaatgattttaagttaatgacgcattcactttgataataattaaagcctctttctatagaacgaatacttgcaatatcaagtaatcccattaatgatactcctttttattattatttttaaataaagaaaataaaatagataagtgtctagattaaaatacttgatttatctatattttataacaagtctagaattatcgcattcttaaataactaatatgaaaatgcttgcactaattcttttgtataagggtgtctatcaacattaaataattcctctattgcaaaatcatcgactatcatgccatccttaagaacgataattctattaactaagcgttgtaacacggataaatcatgagaaataacgataaaatgatttaagttcgtaatcgtttgcgcttttaatatattgattacattttgttcagctataacatctaaatttgaagttatctcatcacatattaaaacgcgaggctgtgctaataacgaacgcatgacattaaatctttgtaattgtccgccactcacttcgcttggtaatttagtcaataattgcgcgtttaactcaaaagtagataaatgttgtaataataattgatcctgagcagtattatcagttagacctctgtaataatataacgcttcttttaatgaggtctcaatcgtccaatcagggttaaagctagttaaagggtgttggaaaatcggtaacacagcattgtcacttaagtaaatctctcctttaacaggtttaaacaagccaagaaccaatgaagcgagcgtacttttaccacagccactttcgcctaaaataccaacattttctccatcaggtatagtaatattgatatcttgtagcaccatctgctttttattataaccaaaagtcacatgttttaactcaatcatagtaatccctctttaattgtgttctatatttaattagacgttcagtatacggatgcaaatgctcatacttgaaatgattaatattacctcgttcaatgatttgaccttcttttaaaacataaatgtactgacaatatttcaatacatgacttaagttatgtgtgataataaataatgtttgaccatgttctaatacaatatgctgtaataaatccatcacttgattaccgttcaaagcatccaatgatgcaactggttcgtctgcaatgattaatttaggctccaacatgagaacgcttgctatgtatacgcgttcaagttggcccccagaaagttggaaactatatttatttaatatatctttgctttgtaaattaacccacgacaaagccttatcaactttggacaaagcctcttctttactacctttataatgcttacgataaatcgcagttaactgtttacctaatttagtatggtcgttaaaactttctgcataattttgagaaatatagccaattgtatgaccataatattgactcaatctactaacattttccccatcaaattggtacgaatcatacgtgcagcttaaatcaaatggtaaatattcaagtaaagctttagcaatcaaactttttccagcgccgctctctccaatcaaggcattaatctgttgactaaaaattttcaaatcaatccctttaataagagatttctcactagtattctttattgttaaattttgtatatcaatgagactcatcatattcaccccgttgtttcagcaatctatctcttagtgcatcaccggttaaattaaaaattaaaatagttatagcaatgactgaagcaggtgcaatcaacataattggatgagacgaaataaaatcacgaccttgttgcaacatagcgccccactctggtgttggcggttgtgcacctaacccaataaatgatagtgaacttatatatagaatgattttaccgaaatcaacgaccatcaaaacgataatagccggtataattttaggtgttaaatgacgtattaatattgttcttgttggtacatgaaataattgtgccatttttatataaggcttattcatttcgctattaactatacttctagtcaaccttgtgtaattcatccattttattaatgtaattgagataactaaattccataaagatggttgaaaaaaacttgctaaagcaatcatgatgataaattctggaatacttagaccaacatcaataaaccttaacactaatcgttcaatccacccttttttgtatccggcaaatagacctagtgtaacacctatgacaacgatagctattaatgttaaaacagtaacaaacaatgttgaacgtgcaccgataataattcgggtaaataaatctctcccataatcatcagttcctaataaatgcaaccaactaataggttcaaaagtttgtgataaattgactttggttgcattttcactactgacaaagaattgcagtacaattaccacaaaaataaatgcaacgaatacaaaaaatatcaggttattctttgaaaatattttatgcatgacggtcactactttctgatatcaatggtgtattggttttgatttttggatttcctaattgtaaacgctgcttcggatcaagtaataacgttaataaatcagcaatcgtattgataataacaacgaagaagccaataaataacacgcatccttgaataacaggataatctcgagatttaatactatccattaatagataaccaataccaggtatatcaaataaattttcaatcactacagtaccacctattagactgccaagtgaaatccctagtaatgggataatcggcaaaattgttggttttagtaaatcatgaattaaaatataacgttcattcataccgcgtaatcttgatgcttgtacgatattactttgcaataacatcaataaattagaacgcactaaacgaatgatgtatgcacacatacctaaagatagcgtgattacaggtaatataaactgacttagtataacgctatctatattcattaaatttgtgacaataaataataaaataataccgataaagaacgctggtaaactaatcgatagtgttgagatcactctaatcactttatccgtccacttatgaaatcgtttggctgctataatgccgagcggtatagatatgcataacgacactactaatgttgaaaatgatatgagtaatgttatgggtgcatagttgaataatatctgtgttaccggttcttttgattcaaaactttttcctaaattaaaatgtaataaatgattcatccaatgccaccactgtaccaataaagaatcatttaatcccaatttatctttggttgcatttatttgttccgtcgacacttgtgctacatcaagatgtaatattttatcaacaggattgcctggtgataatttcattaaaatgaatgtaagtgtagaaataacaaataaaacaactatcatttgcatcagtctatacaacatagactttattatgaacataatagtccccctccttgtgtaagttactaacactttctttttacatgagaatggcgcatgtatatgcaacttacatattaagaactaacgttcattatagtattatccataaagaaattgaagtatatttaattttttaacaaaatcattataaaatataatattttgaatcaagtcaaccatgtaaaatataaaaaagtcaaaacaaaaacaactatagcactgtattccatctctttcgaaataattgttactgcagtgtaacttaaaagtcgatgattttgtgcatatagttgtcgaatattattttttatctttacggcgaagttcagcgccctcatagccgtatttttcaatttgcttttctaatttacgcgcttttctttctttacgccaatttctagtaaaataccataatagaaaactaattaataaactcataatcgctaaaaatgcagcgtatcctaataatggttgatattttatatcttgaaaatttggaataaaaaatgcaagcacacctaatataacaaatgtaattactgcagatacaaaccatttatttaaaactaagcaacagaatattgttaataaaatcattattaatgttgtgatccataaataattaggcatatcgaataatgtcatattcattctccttttatttcattactttccttgtatacattttattataaatttttaaaaacttaaacaatagcagtcagtttcaagcaatattctatctactaatagaaaaatcattgttccttgcgacatggaaatcgtaacattatcgtttaggagacaaaattatgtataatgaatgtattataccaaaggagtgattatatgtctcaaggtttacctttaagagaagatgttcctgtttcagaaacatgggatttagtagacttatttaaagatgatcaacaatattatgaaagtattgacgctctagtacaacaagcaaatcaatttcatcatacatatgcaacaacattaaattcaatcgaacaaattaatactgctttagctgaattagaaaatattttaattgccttagatcgcttaagtaattatgcagaactacgtttaagtgtagatactagtaatatcgaggcacaagtattgagcgctaaattatctactacatacggtaaaattgttagccaattatcatttgtagagtcagaaatacttgaattaccagaagaaatacttcaacaattagaagaatcatgtccatatcaacactatattaaacagttaataaaacaaaagccattccaattatctgcgtcggtagaacaagtattagcaactttatcacctacgctaaacagtccttacgatttatacggcacgacaaaaatgctagatattacattcgattcatttgaacatgatggtacaacgtaccctgtcgactatgctacgtttgaaaatgattatgaagataataaagatcctgagtttagacgtaaaagtttcaaatcgtttagcgatgggattcgaaaatatcagcatactaccgcggctacatataatatgcaagtacaacaagaaaaaattgaagctgatttacgtggatttgaatcagtcatcgattatttattacatagtcaagaagtaacgcgtgatatgtttgaccgtcaaatcgatatgattatgcgtgacttggcaccagttatgcagaaatatgctaaacttttacaacgtattcacggattagataacatgcgttttgaagacttgaagatttctgtagaccctgattatgaaccagagatttcaattgaagactcaaaaaattatattttcggtgcgttaagtgttttaggtgatgactatacaaacatgttacgtgaagcatacgatcagcgatggattgattttgcacaaaataaaggtaaagatacaggcgcattttgtgcaagtccatactttacacattcatatgtgtttatttcttggactggtaaaatggctgaagcatttgtcttagcacatgaattaggtcatgcaggtcattttacattagctcaaaaacatcaaccatatcttgaatcagaagcatcaatgtactttgttgaagccccttctacaatgaatgaaatgttgatggccaattatttatttaacacaagtgataatccaagatttaagcgttgggttattggctcaattttatctagaacatattatcataatatggttacccatttattagaagctgcttatcaacgtgaagtgtatcacaaagtagatcaaggtgaatctttaaatgcgccgacattaaatgaaataatgctaaatgtttataaacaattttttggagatgcagtagacatgactgagggtgctgaattaacatggatgcgtcaacctcattactatatgggattatattcgtatacgtattctgctggcttaacaatcggaactgtcgtttctcaaaagattaaaaatgaaggccaaccagctgttgatgcttggttagaaacattgaaaaaaggtggtagtgtatcacctgtcgaacttgcaaacattgcaggtgtagacattactacagaacagccacttaaatctacaattcaatatatttctgatttagtcgatgaagttgaaaaattaacagatgaaattgagcaagcaaataactaagatgcgagacaatttatagtagaacaatataaaccaagattttcacattactaattgtgagaatcttggtttttttgagggtttatgaataatagaaatatatatttatcgtaagggattttatagtaataactttaagttattgttcgtaatgtgtacctgttaaataaaaataaacactttcagcgatgttaataatatgatcaccaatacgttctaaatgtcttgctgctaaatgagcttgtgcagcgacaaatggatcgttatcaataagatacgttgcgttaataatatgactatataagtcatcgatatcttcatcacgctcaattatttctcttattaatacggtatctttctttttaaatgcttgatctaagtcctttaacattaacatagctaatttacccattgtctttaaacgggttaacacataatcatctgtaatctttgtacgcaatcgaatattggcaatactcgaggcattatctcctattctttctaaatcggaggcgatttttaatgaagaaatcatcatacgcaaatcactcgcaatgggctgttgctttgtaattaacatgataactcgctcattaatatcataatttaattgattgatatgtttatcgtttttaactgtttgtcgtgcaaagcctctatcgtcaatacttaatgattttataccattttcaatactcacatagacatttgcacctaaccgacgtaattcttttattaaatcatcaagttgctcctgatatcgttgtctaattattgccattatatatcaaccaaaccttcctgaaatataatcttctgttttcttgtttgatgggttagagaaaattttatcagtatcatcatattcattgacataaccatttaagaaaaatgcagttttatctgatacacgagctgcttgttgcatattatgtgtaaccataataattgtatacttttcttttagttcttgaaccaactcttctactcttaatgttgagattggatctaatgctgatgtcggttcatccattaaaatgacttcaggttcaattgctaaacaacgcgcgatacaaacacgttgttgttgcccaccggataaactatatgcatttgtgtgcaacctatcctttaattcatcccaaattgcagcgccacgtaatgatttctcaacgatttcatcaagaacttttttatttttaataccgtgaatctttggaccgtaagtaatattatcgtatattgattttggaaatggattaggttgttgaaagaccatgcccacatttgtacgtaattgttctttagaatatttttgatcaaaaatgtcttgatctcgatataatattttaccagctgttttcacagaaggtactaactcaaccattcgattcaaagttttaatatatgttgatttgccacaaccagatggacctataatggcagtaatttggttttcataaatatctaaattaatattttgtaatgcatgattttcgccataccataagtctaaattttgtgttgaatatataacagaatgtgagtttgtatcatctggtgttttatgatgactttgtgagacatcaaacgtatgactttgagatatttgtttagtttgtgcaagtgtttgcgccatatttaaaactccctttttaatagataaatgagattgattgtttaaattagaattttttactaaatttgttacgtaaaataatcgcaacgccattcattaagattaagataactagtaaaacgataatgcctgccgatgcaacattctggaattcttcttgaggcattttcgcccaagtaaatatttggataggtaatgctgaaaattgatccaatatacttctaggtgttgccaataatatagtcggtataccgattagcacaagtggcgctgtttctcccagtgctcttgaaagagacaaaatgaatccagttaaaataccaggtaacgctgctggtaagacaacacgtcttatcgtttgccatttattagcacctaagccgtaagaagcttcgcgtactgagttaggtacagctctaattgcttcctgacttgaaacaataataattggtaatatcagtaaggtcattgttagcgctgctgccaatatactgttacccattttcaaggcttcaatccctgcaccaccaacgaacaaagtataacctaataacccaaatacaactgatggtacaccagctaaattggaaatactgattttaacaaactgagtaaatttgttgtttttcgcatattcttctaagtatatagctgtacctattcctaggatgattgataatggaatgatacttaacattaaccaaagtgaaccgattaacgcgcctttaacgccagccatagatggtgttgaagaagaaaaattagtgaaaaactgtaaatttaaatgacttacccctttaatcaatgtttgagttaacaacgcaataagtacgacaagtcctaataatgtacatgctaaaaatatgagtttgaacactttatttttaaccgttctggatgataaatgtttttggacaagttgttgatcgacgagtgattgtctattattatctgtcgtttccatattaatactcctccctaaaacgcttagaaatccactgagaaagtaaattcatgattaaggtaaagataaatagtgtgaaccctacagcataaatactgtaataaatatttgatccaaatgttgcatcacctgtcgctatctcaacaatatatccagtcattgtttgaatcgaacttgttaaacttaatgaagctgttggcgaactacctgccgctaatgatacaatcatcgtttctccaattgctcttgaaatcgcgagaacgattgaagctacaatacctgatgttgctgcgggaagtacgactttagttgctacttctaatttagttgctccaagtccataggcaccttctcgaattttatttggtacagatgccattgcatcctcactcaaacttgtgatgagagggacaatcataataccgacaactaagccgggacttatagcattaaactctccaagacctggtatgaaagatcttaatactggtgtaacaaaggttaatgcaaagaaaccaaacacaattgttggtattcctgctaaaatttctaatatcggtttaattatgcgtcgtgcacggtcacttgcatattcacttaaataaattgctgcaccaagcccgactggaactgcaaatatagtcgcaataactgtgatttttaaagtccctattatcaatgcccagataccaaacttagggtctgaaccggtaggattccaagtagtagaaaatagaaattcagttattggaattctggtgaaaaaagtgatggtttctaaaagcaatgtgattaatatacctagtgttgttaaaatggaaatcgctgaaattgcggctaaaataactggtataattttgtcattatgctttccttttttattattatttttttcgattaaagctttaacattagtagatgaagtcataatcaaacctctttctattactcccaaaataattagatttgtaaaataatgatgaaccactattttaagttgataagcttgtagactaactgaatgtcaaaatcagcgtctcgataaatcaagctttgtactctaaataatgattcaccatcaaaatcatgtttcaagacacatttgaaattgcgtcttattattttttgtcttcagactttttatcatcagatttcttgtcgtctgatttttgatttttatcaataaatgcttttaaatcatctaattgtgatttgtatgttttctctggtgctgctacatatccagcttcttcagctgctttacctttatcttctaagacgaatttgataaattctgacattactttattatctttcaatgctttttcatttacataaatgaataatggtctacttaatgcataagagttatcttgaattgtttttttcgtaggctctgttgctttaccattttcatctttgattttaacttcttttaatttatctttattttgtacgtagaagttatatccaaagtatccgattccctctttgtttttcgttacagaagaaacgatagcatttgtatcagcatttttttctgctttaatatcttctttattcattacttcattttcaaagaagtcataagtaccatgacttgagtttggtgatacagcatttatttttttatctggccatttactattaacatctttccatgttttagcttttccagaataaattgcttttaattgctgtttgtctaattcatctacaaaatcattttctttatttacagcaaccgttacaccatcttgcgcaattttgaattctttgtatttgatattcttatcttgtaatttttgcttctcttcatctttaattggtctagaagcatcagcgaagtcgatatctcctgcaatgaatttttggaaaccagcacctgtaccagcttgtcctgctgagattttagcatccgagtgatcttgagcccatttttcatttaatttctccacaattggtgctactgttgatgagccatcacctttagcttccccttttaaatcactattaccactgccaccattaccgccaccacaagcacctaataatagtgttgcacctaaagctgtagtaccaacaaattgccattttttcattgaaatatcctccctgtatgaacaacaaatagtatttgtattgattacatctttatcttaaccttgaattattaacctcatttttagaaactgtaaatgttacataaaaaattgttaagaaaatgtaaatattaatttttgttaatctaaaaaatattgcttcattagtaaaattaaaatgcttcctgaaaaatcatcgaaatttaaatatgaatacaaaaatggctgggacataaatccctaaaaaaacagcagtaagataattttcaattagaaaatatcttactgctgttctctatttatacaatacttcgtattgaatggcttcgctttgcccgtctgtcacattactgtaaaattctataaatagaatttttgatgacgggtcccttcctagggtgccgtctcagccaccccaaccggcacattgttgtaagctgactatatgtcagcttctgtgttggggcccctgtcttcgactggcactgctccctcaggagtctcgccattaatactacgtattaacatgtaattttactttgaaatacattaaagcccaaattaatcaaaagctttctgaaccagaaacgaaaaaaatctatagtcatagaaaaatttatgtagagcctgtttttggatttatgaaggctattttgggtttcactcgaatgtcagttcgaggaataaataaagttaaacgagagctaggttttgtattaatggcacttaatataaggaaaatagcagctcaacgagctgtacattataaaatacatatcaaaaaagctgatttccatcaaataattaatagaaatcagcttttttacattgcctaagaacttaatgtcccagcctattcgtttgaattatttaattttttactttgaaaggaatgtttaaaaaactacttcatctgtccgatttaatattgaataaaaaaaacacgcatcctacgacacgtgtaaaaatgattattcttttgagtccattcgactccaaccttttttagttaaagcgattttacctgtttctatattaataatcttctgtttatataagtgaccgattgcacgtttgaatgaacctttactcatattgaatacttctttaatcgcttcagggcttgatttgtcccagaatggtaattcaccatcatattcaactagtaaatcaaagatgacttggccgtcatcgtctaaacgttcatgtgcaagtggtaaaaatgaaccatttaactcacctttatcattatgcccgataattctaacttgaacagattcacctaatcttggttcagctttacgttctgattcatgtacgaaaattttgtaacctgattcgcttaataaaaagctaccaattcgtaatacgcggtaaggtttggcttcaatgacttcgttttttaaattatcgtcgtgtacaggtgtaaacatattttctacaacagattcactcgctaaacgtccatacatatgattctcacggtcaattcgtaatgtaactagcaaataatcaccaggttgtggccatagtgatttcacttttggtaaatcttcccatggtactaacacttcacggggtaatccaacatctatacgtgccccatcgcgatccgttttaagtactttagcaaagtcatatttatctttcgtaatatcaggcatattttgagttgcaaataattcacctgaacggtttggataaatgaagaaactatattcttcacctacttctaattcatcatcatcgttcatttctgattggtttaactttacgttttcaccgtttggtccttttaaaaggtaagttgaaccttgtaaccctactacttcaaggaattctatagaacctactatatctttgtctaatgccatgttattctccttcgattcttgtattctttattattataacatgtgtgagtcattctatcattacaacttatatgaggtcgaaactgtgacgataatatgatataattcttccgttagaatatcgaatgaaaaaaaggagaaaatgcatgttacaagtaactgatgtgagtttacgttttggagatcgtaaactatttgaagatgtaaatattaaatttacagaaggtaattgttatggattaattggtgcgaatggtgcaggtaaatcaacattcttaaaaatattatctggtgaattagattctcaaacaggacatgtttcattagggaaaaatgaacgtctagctgttttaaaacaggaccactatgcttatgaagatgaacgcgtgcttgatgttgtaattaaaggtcacgaacgtctttatgaggttatgaaagaaaaagatgaaatctatatgaagccagatttcagtgatgaagatggtatccgtgctgctgaacttgaaggtgaatttgcagaaatgaatggttggaatgctgaagctgatgctgctaaccttttatctggtttaggtatcgatccaactttacacgataaaaaaatggctgaattagaaaacaaccaaaaaattaaagtattattagcgcaaagtttattcggtgaaccagacgtactattactggatgagcctactaacggtctcgatattccagcaatcagttggttagaagatttcttaattaactttgataatactgttatcgtagtatcgcatgaccgtcatttcttaaataatgtatgtactcatatcgctgatttagacttcggtaaaattaaagtttatgttggtaactatgatttttggtatcaatctagtcagttagctcaaaagatggctcaagaacaaaacaagaaaaaagaagaaaaaatgaaagagttacaggactttattgctcgtttctcagctaacgcttctaaatctaaacaagcaacaagtcgtaaaaaacaactcgagaaaattgaattagatgatattcaaccatcatcaagaagatatcctttcgttaaattcacacctgagcgcgaaatcggtaatgacttactaatcgttcaaaatctatctaaaacgattgacggtgaaaaagtattagataatatttcattcacaatgaatccaaatgataaagcaattttaattggggatagtgaaattgcgaaaaccacattgcttaaaatattagccggtgaaatggaaccagacgaaggttcatataaatggggtgtaacaacgtcattaagttacttccctaaagataactcagaattctttgagggcgttaatatgaaccttgtagattggttaagacaatacgcaccagaagatgagcaaactgaaacatttttacgcggcttcttaggccgtatgctatttagtggagaagaagttaagaaaaaagctagtgtactttcaggtggagaaaaagtacgttgtatgctaagtaaaatgatgttatcaagtgcaaacgttcttttacttgatgaaccaacaaaccacttagacttagaaagtattactgctgttaatgatggacttaaatcattcaaaggttctattatctttacttcatatgactttgaatttatcaatacaatcgcaaaccgtgttatcgatttaaataaacaaggtggcgtttcaaaagaaattccatatgaagaatatttacaagaaatcggcgttttaaaataaacataatatgtagaatttcttttcgaaaatctctgtattgaggcccgaccaacttgcacattattgtaagttggcttactgtcaccttctatattgggacttattccgcaacttgtattgtttgtagaaattaggaatccaatttctctatgtgttgcaccgacaaggattgaaaaaagctagctacaaagtcattttcattcagtcaactactgtcaatataacattgcagggcctagggcattgattcatgtccgagactatattcaatttaatagacattaactgggcgtctcgatgctaatatttatagcatcgaggtgtcctttttattttattttttaacacatcagcatagtgaacaccccttctctaaattacaaatacagttatcaacgcattaaaagagtacatttatttaatgtgcatattgattatgctataagtattttgaattttatttttcaaaaagtctcattatcaccaccttttaaaatataagcaacgctataacttgaattttcaggttattccaaaaaatctaaattatcggtttacattcatatttgtcatatgtataatgaacacataccaatttaataatattttgatgaggcgcatcaatcatgagtaaagtttagattactgtctgctaacagctaaatttgaaagggtgcgatgccgaagcaattataatagcagttataatttgttggactttttggttaagagctgagagtttgtcattatttaaaaataatggagtgcatcacttgtatatagattaagagcaagttcgcattccgaacttgttctttttttattattgtgtgcccttcctaacaattaggaggattatatggtaacaagaagtgtgttgaaatttggcggatcatccgtcagtgattttacaaaaataaaaaggatcgctgaaatgttaaaggagcgagtcaatcaagatgaacaattaattgtcgttgtaagtgctatgggtaacacaacagatcaattaatgacgaatgtatcaaccttgactaaagcaccaaaacaacaagaactggcattattattgacaaccggagagcaacaaactgtatcttatttatcaatggtattaaatgatatcggtatgaatgccaaagcaatgactggctatcaagcgggtattaaaaccattggccatcatttaaaaagtaaaattgctcaaattaatcctcaaacatttgaacaagcctttcaagaaaacgatattttagtagttgctggatttcaaggcatcaatgaacatcaggaattaacaactttaggcagaggtggttctgatacgaccgctgtggcacttgctgttagtaatcaaataccttgtgaaatttataccgacgttgatggtgtgtatgccactgacccaagacttttaccaaaggctaaacgactagacatcgtctcatatgaagaaatgatggaaatgagcgctttaggtgctggtgtacttgaaacaagaagtgttgaattagctaaaaactataatatccctttatatttaggaaaaactttatcgaacgtgaaaggaacatggattatatcaaatgaagaaatattagagaaaaaagcagttactggtgtggctttggataaacatatgatgcatgtaacaattagttatcccctacctgacaatcagctacttacccaactatttacggaacttgaagaaggtgctgtaaatgttgatatgatttcacaaatcgtcaacttggatgggctacaactatccttcacgattaaagatagtgattttcatcaaatttctatgattcttgaaacattaaagaatcaatatgaagcattagcttataaaatcaatgagcattatgtcaaaatttcattaattggctcaggcatgcgtgatatgtcaggtgtggcatcaaaagcatttttgacattaattgaaaataatatacctttctaccaaacaacaacatctgaaataagtatttcatacgtcattgatgattttaatgggcaacaagcggtagaaaaactatatgacgcatttaacatttaatggtaaaatgattgttaaaatattctaaaaattggaaattattataaaatggagtgacaagttatgacaaagttagcagttgtgggtgcaacaggattagtaggtacaaaaatgttggagacattaaatcgtaaaaatattcctttcgatgaattagtattattttcatcagcacgttctgcagggcaagaagttgaatttcaaggaaaaacatatacagttcaagaattaactgatgctcgtgcaagtgaacatttcgattatgtattaatgagtgctggtggcggtacaagcgaacactttgccccactttttgaaaaagctggtgcaatcgttatagacaattcaagtcaatggcgtatggcagaagatattgatttaatcgttccggaagtcaatgaacctacatttacaagaggtatcattgccaatccaaactgctctacgattcaatctgttgtacctctaaaagtattgcaagatgcttatggtttaaaacgagtggcatatacaacatatcaagctgtatcaggttcagggatgaaaggtaagaaagatttagctgaaggtgtaaatggtaaagcaccagaagcatatccacatccaatttataataatgtgttaccgcatattgatgtgtttttagaaaacggatatacaaaagaagaacaaaaaatgattgatgagacgagaaaaattttaaatgcgccagacttaaaagtaacagcaacatgcgcacgtgtgcctgttcaagatagtcatagtgttgaaattgatgtaacgcttgacaaagaaacaacagcagaagatattaaagcgttatttgatcaagatgaccgcgttgttttagtagacaatccagagaacaatgaatatccaatggcaatcaattctactaataaagatgaagtgtttgttggccgtatacgtagagatgattcattagaaaatactttccatgtatggtgtacatcagacaatttattaaaaggtgctgcattaaatgctgtacaagtattggaacaagttatgcgtttaaaaggagcgaattaaaatgacacatttatttgagggtgttggcgttgcacttacaaccccttttacaaataacaaagttaatattgaagctttgaaaacacacgttaattttttactagaaaataatgcccaagcaatcatcgttaatggaactactgctgagagccctactttaacaacagatgaaaaagaacgcattctaaaaacagttattgatcttgtagataaacgtgttcctgtcatagcaggaactggcactaatgatactgaaaagtcaatccaagcttcaatccaagctaaagccttaggggctgatgcaattatgttaattacgccctactacaacaaaacgaaccaacgtggtttagtcaaacactttgaagcgattgcagatgctgtgaaattaccagtcgtgctgtacaatgttccttcaagaacgaacatgacaattgaaccagaaactgtagaaatattaagtcaacatccttatatagttgctttaaaagatgctacgaatgattttgagtatttagaagaagtgaaaaagcgcattgatacaaattcatttgcattatatagtggcaatgatgacaacgtcgtcgaatactatcaacgtggcggtcaaggggttatctctgttattgccaatgtcattcctaaagaatttcaagcgttatacgatgctcaacaaagtggattagatattcaagatcaatttaaaccaatcggcacactgttatcagctttatcagttgatattaacccaattcctattaaagctctaacaagttatttaggatttggaaattatgaattacgtctaccattggttagcctagaagatacagatactaaagtgcttcgtgaaacatatgacacatttaaagcgggtgaaaatgagtgaaaatattactaattggctatggcgcaatgaatcaacgcgttgctagattagcagaagaaaaaggacatgaaatcgttggggtcattgaaaatacaccgaaagcaacaacgccatatcaacaatatcaacatattgcagatgttaaaggtgccgatgttgcaatagatttttcaaatccaaatctgcttttccctttattagatgaagattttcatttgccattagttgtggcaacaactggcgagaaagaaaaactacttaataagttagatgaattgagtcaaaatatgcctgtgtttttcagcgcgaacatgagttatggcgttcatgcattgactaaaattttagcagctgctgttcccctacttgatgatttcgacatcgaattgactgaggcacatcataataaaaaagtagatgcaccaagtggtacgttagaaaaattgtatgatgtgatcgtatctttgaaagaaaatgtaacacctgtgtatgatagacatgaattaaatgaaaaacgccagccacaagatattggtatacattctattcgtggaggtacgattgtcggtgaacatgaagttctatttgctggcactgatgaaacgattcaaatcacgcatcgtgcacaatcaaaagatatttttgcgaatggtgcaatacaagcagcagaacgcttagttaataaaccaaacggcttttatacgtttgacaacttataaacatattaaaggagatcgattattttatggtacaacatttaacagctgaagaaattattcaatatataagtgatgctaaaaagtctacaccaataaaagtatatttaaatggtaattttgaaggcatcacatatccagaaagttttaaagtatttggttcagaacaatctaaagtaatcttttgtgaagcggatgattggaaacctttttacgaagcatatggtagtcaattcgaagatatagaaattgaaatggatcgtcgcaattctgctattccattaaaagacttaacaaatacgaatgcacgaattgaaccaggtgcgtttattagagaacaagccattattgaagatggtgctgtcgttatgatgggcgcaacaattaatattggcgcagtcgttggcgaaggtacaatgattgatatgaatgctactctcggtggtcgtgctacaactggtaaaaatgtacatgtaggggctggcgcagtattagcaggtgtgattgaaccccctagtgcttcaccggttataatcgaggatgatgtattaatcggtgcaaatgcagttattttagaaggtgtacgtgttggtaaaggtgctattgttgcagctggcgcgattgtgacacaagatgtaccagctggtgcagttgttgctggtacacctgcaaaagtgattaagcaagcttctgaagtacaagatactaaaaaagagattgtagcagcattaagaaaactgaatgactagtgacgtcaacgtataataatttcaaggttgagatacgattatgtctcaaccttattgtttagcattgaataaacttatgatcacaaatttcgaaatacgttacactatttatatagtaatttaacacaaaggattgataattatgaatgaattagaatttgttacgaaacatcgccgtcatttacatcaacatcctgaattaagcttacatgaatttgaaacaactgcttatattaaagcgtttttagatagtttaaatattaaatacgattgcccattggaaactggcgtcattgcatacttagaaggtaatggctcacatacgatagcgtatagagctgatattgatgcgttacctattttagaggaaaatgatgtgccttatcgcagtcaatctgatcatgtgatgcatgcttgtggacatgatggtcatacaactgcattaatgctttttgtacaacgttgcaaagacatgcaagatgcaggtcaattaccgcaaaatgtcgttttcattttccaacctgcagaagaaactggtggcggtgcaaatcgattaataaaagccggtgcctttgataagtatccaattgaagcggtatttggtattcatgttaacccatttgctgatgaaggcattgcagtgataagagatgaagaaattacggccagcgcaacagagtatcgctttttcttaacaggcctgtcaagtcatgttgctgataaagaacaaggtcattcttgtggtgaagcattacaacatgtattaactcaaatatcacaaattcaacaatttcaccttaacggtttgaaacgaaatattgttcatattggtcattttaaagctggtgaagcgattaacactgtaccaagtaatggctatttagaaggtactattcgtacatatgatattgatgatttaacaatcgttaaaaatcaaatgcacaagatagcagaaagtgtcaagcttctgtttaatgtagattgtgaagttaaatttgcagaaggttatccccctacaatcaatagtccgaaattacgtactcaaatagaggacgccttaataaaagctgatttaaatgtctatgacaaaccaac

SEQ ID NO: 2 - DNA, 2872915 bp, Staphylococcus aureus subsp. aureus USA300_TCH1516 (residues 1,436,459-2,872,915 of 2,872,915)
gccattcttatttggggaagattttagtttttatggtcaacaactagctccagcttactttgtttttataggaacacgaaatgaagataaaggttttgtaactggtttgcacacatcacatttaaattttgatgaaaaagtgttaataaacgtggttaatttttacgaaaatttattaaataattacaaagaggtgtaatacattgacagcaacatggtctgtaaataagaaaatatttttacaaaatgcaatcacagtcaaaaacaatcagccattaatggcagttgttaaaaataatgcatatcactatgacctagaatttgctgtaactcagtttatccatgcaggtatagatacatttagcacaacatcactacgagaagcaattcaaattagacaacttgctccagatgcaacaatctttttaatgaatgcagtttacgagtttgatttagtccgtgaacatcaaatacatatgactttgccgtcgttgacatattactataaccataaaaatgatttagctggtattcatgttcacttagaatttgaaaatttattacatcggtctggatttaaagatttaaacgaaattaaagaagtattgaaagatcaccatcataatcaaaatgcaaaaatgattattagtggtttatggacccattttggatatgctgatgaattcgatgtgtcagattataatgttgaacgttcacaatggatggaaattgttgaagcacttttatctgaaggttatcagttcgacctaatccatgctcaaaatagtgcgagtttttatcgggaaggacaaatattactaccccaccatacacatgcgcgtgtaggtattgcgttatacggttcaagaccatatagttcactgaatcaacatgatatagttcagtcattaactttaaaagcacatgttattcaagtgcgcgaagtacaagctggtgattattgcggttatagctttgcctttgaagtgactaaaaacaatacaaaattagctgtagttgatatcggttatggcgatggaattttaagaactcgtgctaaacatgaagcacttatcaatggtaaacgctacccgatacgtgcattaatgatgagccatatgtttgttgaagtagatggcaatgtacatgcacaagatgaagttattctttataataatgatatccgcatcgatgaatatacctttaaaggtgttggtgcaaattctgaacaattaagtgctatgaatcatgattctttaaaaaaggagtacatttcaaatgactgttaaatataatcaaaatggcgaattaacaatggatggtattagtttaaaaacgattgcacaaagctttggtacacctaccattgtttatgatgaactacaaattagagaacagatgcgccgttaccatcgcgcatttaaagatagtggattaaaatacaatatttcatacgcctcaaaggcatttacttgcattcaaatggtcaaacttgtagctgaggaagatttacagttagatgttgtttctgaaggtgaattatatacagctttagaagcaggttttgaaccgagtcgcatccatttccatggtaacaataaaacgaaacatgaaattaggtatgctttagaaaataatatcggttattttgttatagattcattagaagaaattgaattaatagaccgctatgctaatgatacggttcaagttgtattacgagttaatccaggtgttgaagcacatacacacgaatttattcaaactgggcaagaagatagtaagtttggattatcaattcaatatggcttagctaaaaaagcaattgacaaagtccaacaatctaaacacttaaaattaaaaggtgtacattgtcatattggttcacagattgaaggtacagaagcatttattgaaactgctaaaattgttttacgttggcttaaagagcaaggcattcaagttgaattattaaaccttggtggtggctttggtattaaatatgttgaaggtgacgaaagtttccctatcgaaagtggtattaaagatattacagacgcaataaaatccgaaattaaagttctaggtatagatgcaccagaaataggtattgaaccgggacgatcaattgtaggtgaagctggcgttactttatatgaagttggaaccattaaagaaattccagagattaataaatatgtttcaatcgatggcggtatgagtgatcatatcagaactgcactttatgacgcaaagtatcaagcattgcttgttaatagaaatgaagaagcagatgacagtgtaactatagctggaaaattatgtgagtctggtgatatcattattaaagacgctaaattaccttcatcagtcaaacgtggagactatcttgctatattatcaactggtgcatatcattactctatggcatccaattacaatcaaatgcaaaagccttctgtgtttttcttaaaagatggcaaagcacgtgaagttataaagcgacaatcgttaagacaactcattattaatgatacaaaataaaaataaacaaagtaatccccgaagcacagaaaattatactgtgactcggggaatttttatgcattatagatgactgtagaaaacatgcttggacatatactctaaaaaaggaagaacagcacatttttagttagaaagtatttatttctttttgtcattaatcctttatatttagttagccctattcaactaatttaaagcatcatatacataccacactttaaacaagcatcatgaaattagattttatgctttacttgctttttcaaataatataaaacgataagaattaacaacaaatataatgtataaaacagaatttcatcaaatccaaaatctttacttgtaattaatacatcaatatcttctaattccatcatctctgctttaatataattattaaactttggcaaagtcattaaatgtacattgtaaatatagtaataaaagtcgataaatatgatgttaaaaaatatgtatgttttatcaatattagttttgaaaaatagtatcccagaaatcattatcggaatcactaatacaatcatcattgctgctaaaatattaatatttaatccaattgcagataatacaccgaaaactaataaattagcaactaaactaaggataagatatttcataaaatcacctcgtcgttgtacaccataattatattatataaatatatttttctattgcaaacaatgttggtgatataaaaaaagagttctcaatttggttgagaaactcatcgcgttaagtatttgtaataagcatataaaaacaccttacttcttggtaaggtgttagttaaaatcaatgattcaaatctaagaattatagtttaacaacgtttgcagcttgtggaccgcggtcgccttcaactacttcaaactcaacagcttgaccttcttctaatgatttgtaaccatcttggttaattgctgaaaaatgtacgaatacgtcattttctccttcaacttcgataaagccgaatcctttttcagcgttaaaccatttaactgtaccttgtttcataatctgaaacctccaagactaaaattcattcaatatgcttattcgcatattacaaaaaatacatgcaaatttcactcaaatattctttgcaatatggaataatcatctgcttaacttgtattatagtgcagttattaccaaattgcaatacaataataaaaaatattcatttaatcaattattggtagtttataatatacttcattattttgtaaaacaatgaaactataaaatatttgtaaatcctcttcacaatcttcgcaatagttcatgtcacaattattataaaatgcataaatattatatttgcctgtgacatagttatcgaactgaactttacattgattaatcaattgttgatagtgcttaaacatgtcatcaaaatcttgatattgatatttttcaacaatgttttctggccagtcactgaataaccaccatccctcataatcggctctaattttggtaactgtccacattattaaagaccccttccatacttcaaaaactctatacttatttttatacctttatcctctgaaaatcaagtttgacgacttgaaacaaacaaagtagtaactatagtaattattagtttttttaagtaaaactacgtataataacattatgaggtggtaaaaatgagacatatacatttacaagtattcggacgcgttcaaggcgtcggatttagatattttacacaacgcattgcaatgaactataacattgtcggtactgttcaaaatgtagatgactatgtagagatatatgcacaaggggatgacgcagatatagagagatttattcaaggtgtaattgaaggtgcctcaccagcatcaaatgtaacaagccatcaacttgaagagttagaactaaatcaaaaattatcggattttcgatcaatataaaatgctaaataaaggaagatgacagtgagatataatatttctcatatatttggggtgttagtgggaattcctgtagcgtttttaacaagcatatttgggatgattgcacttgatgtatcttttttaattgatatgtctattggtattgttggctttttaatgacatacctaccgatacaaaaactcacttcacgcaaatatttaaacgaaattggtttgactagaaaagactatcgctatattcgaaatcagttaaatcatacacaccaaaaacttagaggtattttaaaaacgtatgtcaatataagatcaattaaagattttaggcagattaatgatatataccaaatttcacgttctatttatacgacagttagacagagacctgcatcattttataaagttgaaggctttttttattctcatattgataatgctttaaatttggttgatgcatatacacgtctagcaaaaatgcccaaaaaatcaattaatgaacagcaaaagttagaacaaacacgaattactttggatgaggtcaaacgaacattaatcgctgatttaaagcgtctcaacgaagatgattatgaacgtttagatattgaaatggaattaaataagttacatcaaaaacatcatcaagattgatgtaaaatagcaactattggagagatgattgatgactgaaaataaaagtttcaaagaaagccatccactagatgattttataagcgataaagaattatcgaatactactattcaaaaagaaaagttaacaattgaacaacaaaaacaggtagacacaatcagtaaacaaattaaccctttagacaatgaaggtttattagcgtttggttctgatttacagaaacaaatgtctcaattttcacatcaaatgttggatgaagtacaaagtaaagatgttggtcctattggagatactttgtcagatctaatgtcaaaactaaagtcagttaatccaaatgagttaaatactgataaaccatctatgttaaaaagaatttttagcagagcaaagtcgtctatcaatgaaatcttttcaagaatgcaatcagttagtgctcaagtcgatcgcataacgattcaactgcagaaacatcaaacacatttaacaagagatattgaattattagatacgctatatgataaaaacaaacaatactttgatgacttatcattgcatatcattgctgcacagcaaaaaaagttgcaattagaaaatgaaaagctaccacaattgcaacagcaagcgcagcaatccactaatcaaatggatattcaacaagttgcagatatgcagcaatttatagatagactagataaacgcatatatgacttacagctttcaagacaaatagctttgcaaactgcgccacaaattcgtatgattcaaaatgttaatcaagcacttgccgagaagatacaaagttcaattttgacaagtattccactatggaaaaatcaaatggccattgcgcttacattaatgagacagcgtaatgcagttgctgcacaacgagctgtcactgatacaactaatgatttattaacagcaaatgctgaaatgttgaaacaaaatgcgattgaaactgcaacagaaaatgagcgtggcattgttgatcttgatacattgaaacgtacacagcgtaacattattgagacaattgaagaaacattaattattcaacaacacggtcgcgaagaacgacaattagctgaaaaagaattacaacaattagaacaagatttaaagtcacatttagtgaacatcaaaggaccgaataaacaatcataaattacgaattagatataacaaaaaagagcttgggacattaagttccttaaagttcttaggcaatgtaaaaaagctgatttctattatttatttgatagaaatcagcttttttgatatgtattttataatgtacagctcgttgagctgctattttccttatattaagtgccattaatacaaaacctagctctcgtttaactttatttattcctcgaactgacattcgagtgaaacccaaaatagccttcataaatccaaaaacaggctctacatcaatttttctttgactatagattttttcgtttctggttcagaaagcttttgattaatttgggctttaaagtattcccaattataattcttcataattttcttattggatttcgaatttggcttcatgcattgatgtctcaaagaacatgatgaacagtcatcacattcatatagcttgaagtcacgtttaaaactatatctatcattacggtatgcatatcttttaaaacctattcttttgttattaggacatataaattcatcgaattcgctatcagatatcgtttcaacaatttcattaacatatcgcgtattatcattttgaggaattctaacagaagtttctattggtagtgtaagttgggtcatgttataatttttatacataaggcacctcgttaatttagtttagtagtatttattaaattatacgaagggatccaacacagaaaatttattttattgaattttacatttatgtgcaagttgggcaaagtgtcttatttttttaaagtatttcaaagtaaaattacacgttaatacgtagtattaatggcgagactcctgagggagcagtgccagtcgaagaccgaggctgagacggcaccctaggaaagcgaagccattcaatacgaagtattgtataaatagagaacagcagtaagatattttctaattgaaaattatcttactgctgtttttttagggatttatgtcccaacctcttttatattattcgttattcctgttgatatttaattggatcttgttttacaaatatgccgactagatagcctaatatcgttgcaataattgctactgggaaccactctaaagaatacgctcttagaggcaatgattctataaagttaattttcagccaacctaacttactaataacactgaaaatcgacaatataaatacgataataactggaatttgttgtgaaatgcgttttgtcggtatgaatttggcaattaaaattaataatacaacagttattgctactgggtatacaatgcttaataccggaattgacattgagataacagcatttaaaccttggttagcaataataaaactcattaaaatgaaaactaatacaaatgctttgtatgatactttaggtacgattctatggaaatattcagaaactgcaacaataagcccgcatgctgtagttagacatgccagcgccacaatgatgcccaataaatattttccgaatgaaccaaatcctgttgaagccattgtcgttaataaatatgtcccaatgtttcgatctttggatttcaattgatctaacgtcatgtcacttactggcatatgattaccaatataacctaatgaaatatatatgaaaattaaagctacggctgcaattaaaccagcagtcaaagtttgtttgaatatttgatttgttttagtaatgcctgttagttttactgcattaacaacaatcattgaaaaagcaattgctgcaatggcatccattgttaaatagccttgtgtaaagccttcagcaaaacttgaaaaattagaatgatatagtgcttcattgccctttccagcactattaccgctaaagtctaagtatcctttaataatcatcgctaaaatagtaatcaataataatggtgttaataatgaaccaatacgatcgattaacttagatggatttaaacaaatatacaaaacgactatgaagtagataatcgtaaatataaataaagcgatactactattgctatgtataattggtgtaattgtcatttcaaaagatgtagatgcagttctaggtattgcaaaaagtggtcctatagtcaaataaatgatgattaagaacaatattgaaaatttaggtgaaattttatttaatgcgccaatatatccttctttatcaagtgcacctacaatcacacctaataatggtaaaccaatcccagttagaacaaacgctaaaatggcgggccagaaaaattgaccactatccaatccgagattaggaggaaaaattagattgcctgcgccaaaaaacatagcgaagagcgtaaacccaatgacccatgtatttttattcatagagttactcctttttttaaaacacgaaataatttacaagtaaatattttagcacaaaaaataataaagagtctatatgaaatatgttgtacatagcagaaacaaaacacatgtgttgtttaaatcaaattatgtcagaaaataaaattcttcaaatccactttttaaatagtaactgatgacttttattcacaatttcatataaactcatattttaaatttatttataaagatttaagtagtaatttttttaataatggagagagatgtccaggtaaatgcgcaacaccttcaacgaaaatagcatattgaccataaatattatgaattgtttgttcaacatcttcagttattggatcttgactcaaaaatacattaaatacttcaataccaaatttacgtgacatttctacagcttcatacgtatcaataataccatcttgactataattaaatgcagacggttcgccgtctgaaaatacgattaaaaatcgttgatgttgatttcgacgcattaatcgttcacttgcaactctaatagcaacaccatcacgattatcatcttgaggttcaagtgccataatacgtgggccatctttttcaaaggttgagtaatcatagttaataatttcattaatgatatttggttgtgcatgctcgtctgaatcaaaggcatcctcactgaatgataaaatttcatgtttaatgttcaatgcttttaacgtctcgtggaataacactacacctttcttcgtttcagccattttatcatgcatacttgctgacgcatcaattaacaatgtaaatgtcgcatcaaatgatttacttaaatcttgttttttgtaaaacaatttatattgatcgtcgataaaccaattaattaaatccttttgtaatcgcccttttgttaaattaaaacgtgcatctcgttgttctcgttcaatcgttttctttataatttgaattaagtctttgatttcatattgtacgtcttgtttcgattcttgatattctaaaacatattgtggctcaatttcaggaatttgccattttatttctacatttttgttcacaccatcaagttgaaatgcttggctttgaccaacagcatcgccttcttcacgatttagcgtatcgtttgatcctttgccctttttggtcatcatatcagtcatatcatctgtagcatcgccttcacgtgcttcatcattacctaatgtttcactattttgtccttcgtgaagctccatttctaaataggcgccaccttttgactcactatctgcagatttagagtcagctttttcactttcgttatcatcatcttctgaagtatcatcttgcccatcgacttgacttgcatcagttctctttaaatcatcaaactctggactagctaatgtattatatagtgttttaggtaagtaataatattcgtttagcatatcttcttttaaaatatcatctacttgatacataattctttgagccagatacatattatcttcagaattttgattttggaaaaaattaggtaaatataagaacatatttactaaaatatcatctaaatctgaatgtatagatggtatatcaaagaaatcttggcttaaaaatgcatgttctaaatacaaaaataataaatctgtatattgtgttttagtacgatacactttaatttgagattccgtatatgatatacgtgtatctaagcgaagatcaattaatttagcagtacttgggcgctcaactttaatagaatttaatacgcgcatatcttctaataatttaaaaagttgttgataaaatttagggtgtttaaaagttttatcttgtactacttcatttacaatttgtacatccatcatatgataaccgtaagcagctaacataacatctgtttttaaaccagccatttcgatatggcttggtcgatgtgaccaaaaccaactcgtaatcaaaacattttgaacaggattatagtaagggaatttttggattttaacttgtgtttgttcattttttaataagagtcgagctaagtcttgcaacatcattacttgcttggcatctaactgttcgtcattaaattttatgaaacgatcactcatgttttatccctctttaaaagtttagttctacagcattatatattgcttgttgttcacgttcatcttccaatttatcaataattgtacgtttaattgcacgttcaactggcattacagtgattaaatcacacaagtctaataatgcacggatactagcggcttcttcagaaatttgtccctgcttagacatagtacgtaaatcttcattaaacttaataatttgttcgatttgtttatcaccttgtaataaactttgctctttaatcacattttttaaaatgtccccatcaatataatcaacgtgaataacaacaaagcgattttttagtgcttcattcattggcaaagtaccaacataaccttcatttatcgctgctataacgttaaatcctggtacagctttgattacttcaccagtgtatggattcgtaatttgacgacgataatctaagaccccatttaatacaggcaatgtttcaggtttagccatatttatttcatcaatatataaaatatgcccctctttcatagctttaataactggaccatctacaaagacaatttcttgttgaccttccgcatttgttttaattgttttaaagcctaataagctttctgtatctaaatcaacagaacaattgacttgatgcatgggtgtatcaacaacttcacttaatgtttctgccaactttgttttccctgaacctgttggacctttaagtaaaatatttttatttaaatcaaataatgccttcgcatcattgaaaactgttgaatctgaattcttataatgttttagtgccattttaaaacgttctcctttaaataaattaaaaaactaagacatggaataagttctccaaatgccttagtttactattctattctgatataaaacgcaatgcttagtatgcgaattgtttatattttaccaaatttactaattgaaaatctcatattaggcttcatttcaataattatgcgtttaaacttctttgaaatatgttttatagtaaccgccaactaatccagaattatctattatttgataatattcttcagtttcgttgataacatcatattgtttgccaaccgttaacatgtcagaaactgtaaatttctttgcatctgtattaatgacttctactttcttgattggtgtacgttctttccaagtttcatgtaacataaattttgtcctcgctatcgtaaaaaaattatttttgtaaagtgaatataaacgataatccactgttttcagtaattctaattgattcaatatcatcttgctcaagcgtttgatatggtatttccacttcatctaagcgcgatttcgcttgattaaagaaatctgcatctttcgtttcaaactcaacttgatcgactgcgccatattccggcattgtcatttcggtttctacaggcattaaatgtatttcgccacctagaccacccgttccaactttgaatacttggacatgatagtcagcattgtcgaagggttggtattctgcaaatacttcaagtccgaatatatttgttaaaatttgacctgtaatatctacatgattcactttaagaatcactggtcctaaaccttgcacttgatgtaacggattgaccgcactctcaaaagaaggcatacctaaaccaacgccataattattctcgtttgaatatattgagaaaatatgaccattgttatcttcgagactgaaatatttattgccatttaattctttaactgttgtaaatggaatatccttattcgataatatttccgcatactcctctaaacctgagtcagttggtgtacgtaatccaatacccacaaagtgagattcttctaattgctcacttggaacttgtataaattgaagtcttgttcctgggcttatatctgcatcgccgaaacgaattgagttttcaagaagttcttcataatttaatcctaatatgtcaaccatgaaatgttttgtctgttctatatttgttgtacctaatgttatacttctaagtccacacattatagccacctctatctttatctttactattatattataacttattttaatcataaattatagaatatcggtcagttgattttgattatagattaatatgtgaaaaatgtatttctttaaaagaactatttcatttaaataggtaacataatattgttatggttgctattgagtgtgtcattaatgaatatctgtatatagcaattgaatatttcgttttttgtaggacatgaaaaacatatatatgtcgtgtccataaagcgaatttacatcatgttcagatgattttaaattaactaaaggcgcttatagaattcatatatttcatcgtttgttattatctaaaatgcattcattagcatattgaaacacgctattctacctatatttctattgtgagtctatttcaatagaaatgatatattttttaagtagtcaaaattaaacccacattttaatacgaatcattataaaaataaagtacagcagtaagatatttcgactaggaaataatcttactgctgtttgttattgatttaatcccgcttttaggaatagtaaactattttgtgttgtggattaagattctaataataagtcttctgggttttcaattaattctttaattgtttttaagaatccaactgcttctttaccgtcaataattctatgatcatagcttaatgcaatatacatcattggacgattttcgattgtatcttgatcaatcgcaattggtcttgtaataattgaatgcatgcctaagattgcagcttgattaccattgataattggcgtactcatcattgatccaaaaataccgccatttgtaatcgtaaatgaaccattaaccatatcatctaagccaagttttttctctcgtgctttaactgctaaattagcaatttctgcttcgatttctgcaaaattctttttatcacaatctcttacaaatggtactaataatccatcatctgtagaaacagctacaccaatatcataatattgtttcgtaatcatgtcgtcgccgtcgatttctgcattaacttctggatactttttcaaagctgctacagaagctttagtaaagaatgacataaatcctaatttagtaccatcatgatctttcataaattgttctttcttacgtttacgcaattccataacatttgtcatgtcaacttcgttaaatgttgttaacatagctgtattattagatacctctaataattttttggcagctgttttctttctacgtgacattttttcacgaatcactggttttgtaggatattgattgtattttttctcttcttttgcagatgcttgttgtgttgtttgtgttgatgccggtgcctgttgtttcttatcaatatcttctttacgaaccacatcatttgttttcggacttacttcagcaagattcacaccattttcacgagcatatcgacgcgcagaaggcgtagcattaatacgttgctgattgtcatcatttgcttgatttacttcagctttatctaccgaattatttgttgtttcttcttttttattatttgtttcttcattttgttgtggagtattgtcgttactattttctttagaagcattgccactaccttcgccgatgatagcaattgcttgtccaacttctacagtgtcgccttcacttgcaagttgttcagataatacacctgcttcttcagatacaacttcgacattaactttatcagtttctaattcaagaatagcttcacctttttctacgctatcccctacgtttttcaaccattctgcaatggtaccttctgtaatagattctgctaattctggaactttaacctctggcatgacttatttccccctagttattttttaatgcattttctataattttattttgaacaagtttatgaatttctccatcgccttcagctggagcagccctttgaattctgccatgataacttaaatcatatttatctgcaactagcactttaacatatggatagacatataaccatgcaccttgatttttaggttcttcttgtacccatgacacttcttcaaggtttggcaattgtgctagtaatgcttcaatctcttcctctgggaatggatacaatctttcaatcgcaacgagtaatactgattcgtctggatttttagctaatgcttcttttaaatcaatgaacattttaccagttgccaaaataacttttgtaaccttatccgcttgatatgattctgtcaaaattggctcaaatccaccagaagtaaattcatcaattggttttgcaactgttttatttctcagtaagctttttggtgacataacaaccaatggtcgcatttgttcagaatctaaactagccgcttgtgcacgcaataagtggaaataattacttgaactagataagttgacaactgtgcaattattttcagcagctaattgtaaaaatcgctctaatcttgctgatgaatgttcaggcccttgaccctcatatgcatgaggtaagaataatgttaatcctgaacgttctccccattttgagcgagaactgaataagaagttgtcaaaaatcatttgtgacatatttgcaaaatcaccatattgtgcttcccaaatattgaagctttttttgttttccacattatagccgtattcaaaaccaactactgctgcttctgaaagcggagaattgtgtatatcaaatgtcgctttttgatcaggaacatgatgtaaaggtgtatatgtttcacctgtttgctcatcatgtaacacggcatgcctatgactgaatgtaccacgttcactatcttgaccagttaagcgaatcggtgtaccatcttgtaaaattgtcgcaaatgcaagttgttctgcttgtgcccaatcaactaaaccatcttctttattaaacggctcatgacgcttctcaagaactttgtttaactttttcaaaatgttaaagccatccggatatgttaacaatgcatcatttatttctttcaagtgatcaaaagtaaatgattgttcgtctgcttgtaacggtaatgcaagatctgcaggcttttccatatctggattatccattttatcagctttattaattttatcatgagcttgtcttagttccttttggacttgttctataaatgaatgcatttcatcttctgaaatgacaccttcattaacaagctttttaccaaacacatattcaacagagtcatgtttgcgaatattctgataaggaactggattagtaattgatggttcatccatttcgttatgtccgaaacgacgataacctactaaatcaataacgacgtctttatgaaactcttttctaaattccattgcaatatcaattgcttcaatagtagcttcaacgtcatctgcattgacatggaatattggcacatcataacctttggccacatctgtagaataagttgttgaacgtgcatcaattggttctgtagtaaatccaattctattgttagtaataatatgcaatgaaccacccgtagaatagcctttcaagtttcctaagttcattgtttcgaagttaattccttgaccaggataagcagcatcgccatgtataataattggcattgctttatgatgatcagtcgtcggagccccagctcgttgtgtatcatcttgtgctgctctcgtacgcccctcaacaacaggtgcaacaatttccaagtgacttggattgttagccagtgcaatacgctgcattgtaccgtatgaatcagtagttttaatgccaccaaggtgatatttcacatcaccagtccatccagcagttaactgcaagctaccatcttcaggtaagaatttcattggatctgtatgcataaattctgaaatcatcatttcgtacggtttttctaagacatgcgttaaaacgtttaaacgtccacggtgagccatgcctatttgtatatttttaataccttctttcgcagcaatcgtaatagtacgttgtaacatcggtacaagtgcgtctaccccttcaattgaaaaacgctttgcaccaacgaagtttttatgaagatatttttcaaacccttcaacatacgctaattgtttgaatagtgcccttttttcgttattatttaacgttactttatatggcgtttcaattcttctttttaaccaaccacgttcggtattgttattaatatgtgtatactcaaatgcaattggtcctttgtaacgtttttccattcttaaaattgcttcataagcattatcataaatgtcggcaaagtgatctgaaacaattcctgctgatataccttccaaagtctgttgatctaaatcaaagtcttcaatctctaatttaggtacatgtttcctttttggaggatttacaggataaatatcggctttaagatgcccgtattggcgaatattatcaattaaacgcatgacacgcttaattgtgccgtcgctattttgactacttgtactttttaaagctggtacaattgagtcatcattcttaattgtgctgaataagacttgtaaatcttctggtacagatgatggatcttgtaaaaagtcatcatatagatctaacattagacctaaattcgcaccgaagtttacaggagcctctgaaacttcttttctttcgttagtcattttacaccctccacaaaaatgttgaaacgcttacaatgtaataatatcactatttagttatttgttaaagtagatttacctatttatctgctaaaaagaagaatcaacaaaagcgttgattcttctaggtttatagatgtattttattgtaaattttgggagtacaacagaaatgataaagaaccactgtttatttgttttatagttgttcttatacattagtcacagctaatgtgtacttaaaaaattgatcctatgactttgattgacgtctcagtcatgattaaaatatgattttaaacgttgttcctttgttaatttcacttttaattttaatcgatcctccgtttaattgaatgattttttgagcaatagataatccgagtccattaccgccttgacttcttgaacgagatttatccactcgataaaagcgatcaaaaatgaaatcttgatcttcctctggaataccaattccatgatctgtaatttcaattattttttgcttattttttaaccttgtcttaactttaattttcttattcttcacatcatatttgattgcattatcaataaagattaaaaataattgttcgaattgatgaggtttcattttaatttctagatttttagatgtcagatccgtatcaaattgataatcaggatgcaattgttttaatgagtgtattcgcgagcgaatttcatcattaatatgcacggtctgtgcttcagaagaaatgtcatttacatctcctttagtcaattcaagtaattcttcgactaattttatgatacgattcatttcttcaatagaaatatttaacgattcttctaatactgctgggtctttttttccccatcgctgaatcaaatttaaatgaccttgaataatttgtaatggtgttcgtaattcatgtgacgcatcttcaacaaattgtctttgttgattaaatgattcttcaatttggctcatcatctcattaaacgtatttgctaaattatctatttcttcataatttgtatttaattgcaatttattttgaaaaccatctcgtcgaatctcaatcattttatttgataaactgacaagcggtttagtaatttgtgttgaaaatacataactgattgtggcagttataattgttgcaatcactccaaatgccagcgcaatgatatacaatgattttacgatgttatcataattttctagtgaatgaattaacaagctataccctttgaaatcttgcgttgtaattggttctttaataattaaatattcaatgcctttatagcgtttttttattacgcggtcaaaataacggtgttcataacctggttcaactctcactgtgttatcattcgatgtctcaaataatttattattatgctcatcataaataattatctcttgaaaattacctaaagatgcattcaagtctaatgcagatatatctttaacaggcttagaatgaaataaattattaatatcgcttgagcttcgttctgcatcatcaagctcactattatgcagtgtatctttcaagaaaaaaataataattaaacaaaacaaaaatatcgtgacaaacgtaatcatcgtggtaacaataatccagttattgcgcaatttacgttttgtcatcgtatcacatacccaacgccacgaactgtttcaatcattttgtcacgatcgtatggttttaacttgtttcgtaaatatcttatataaacatctacgacatttgtttctacttcactattataaccccatacatgatttaaaatttgttcccgttgcataacatggtttttattttcagctagaagatatagtaaatcatactctgtttttgttaattcaatttctgcgccatttaccgtcactttaaaagcgttcttatcaattgtaataccgttgacatcgataatatccttttgtggctgacgacgtaaaattgcacgaattcttgctaaaagttcttcaatatcaaacggcttaactatataatcgtctgcaccgtaatcaagcccagcaactttgtcatacgtatcacttttcgctgtaattataatgataggtgtagattgttgttgtctaattttgcgacaaatttctaagccattaattgacggcaacattaaatctaatatgattaaatcatagtaatggctaagcgctttatctaaaccgtcttgtccatcatactctgtgtccacattgtaattttcatgtgtgagttccaattcaagaaatcttgctaagttttgttcatcttctactattaaaatttgcgtcatttgtacacctcatattacgactttttctaataaggtaatatattttaaattttgtatttttctatacaatagttgctttttaaattagtttgtttacgtttaaattttatcacaaatcaataaccatgttttaaatttttcaagctacaatcattaattatttattaactcaaatatttaataatcagttaatggcattctgttaattctgattgcagtacttaaatatagaatactgtaacacaaggccttaccgcaatattaattgttgtcatatactgacttttcactattgtaaaatgaatagttattatctttattttcacaaaatgaccgtagtttaaacatttcacacatcatttcaatgtgcgattttgaacttggaagtaacatttcataatgtatgaattcaaaaggagtatgtaaacaatataatgtttaaacctcatcacttttaaatattctaattctaatgagaaatacaaatttttttattttctaaaatagcgtaatcatgcgttttatttactattcttaaaaaatattcaaaaaaagttttagtttctaattgacaatgattctcactaatgtataatagtagttgaaaatgattatcaataccatatagaacatcccccccacaacgtttcgttcttgttggattggtcattttcaaatattccccttttatatgcccgtaaaagacaatatacgttataacaacgttttataaaagcagtaaacccttacgacactttaggtttactgcttttgttttttgtaaaaagaaaaccatacgctatgcgtatggttcagaaaaggttctaccattgtcacaaaaaatgcatctctacgtgctagaataaatattggtcagccaaccaaaataatcaacacgaggagatgctatttaatgtcatctgacacaaacagtttagcacatacaaaatggaattgtaagtatcatattgtctttgcacctaaatacagaagacaagtgatatatggaaaaataaaaaaagatatagggattatattgcgtcaattatgtgaaagaaaaggtgtagagataattgaagcagaggcatgtaaagatcatatccatatgttagttagtataccacccaaacttggggtatcatcatttgttggctatttaaaaggaaaaagtagtttaatgatatttgatagacatgctaacttaaagtatagatatggaaatagaaagttttggtgtaaaggattttatgtggatacagtaggtagaaataaaaaagtgattgaaaattatattcgtaatcaattacaagaggatatcgttgcagaccaaatctcaatggaagaatatttagatcctttcactggagagaaaaataaaaaaagaaagaaaaaagagtaaccctttagggttgctggaatagtagtgcagttggctgacttgtcagtgcccttttagggctggccagtaaggaaggcttatagccgcagaacaaaccacccgttcacacgggtggttttgattttactatttaatttattaatttatttctaagtaataacgttgataaaataatgcaaaataatccaccaataatgccggcaataatatctgttggataatgtacacctagatatacacgtgatatggaaatcaataaaatcatagctgcacataaccctataagaataccttttgaattaccttgatttaatcgatttaatagatagataccacttccaaaatatgcagttgatcccatagcatgaccgctaggaaaactaaatcctgttatatcaattaaacgcagcaatgtaggtctttctctatcgaatatattttttaatgctggattcaaaattccagataatgccattgttaatgcaaaaaataatgcttcaattttgtggcgctttaacatgagatatgccacaagaagtaatgaaatacataacattgcccagacttcacctactttagtagccccaagcatgatagatgtcgtaataaagctctctgatgaatatacaaactcataaacttcattatcaatccatttcccaagtcttgattcgtggaaaaacgcgataattccaaaaaccaatgtaaaaacgatgagcaaagagatacgtttccattgactcataaagcattaccccccattaattcaatgcgtctttaatcatcttatcaaataaagcttctttcgtataactttgttcatacgatttcatattattgataattcgagttctttcctgttccatttcatttagttcttgtaataaaatttgtgctgttaattgttcttcatcaatcgctttagcatatcctttatcagcaaaatgatttgcattgtcaatttggtcgcctcgggattgatctaaacctaatggtactaataacattggtatacgtaatgttaagaactcataaatcgcatttgatccagctctacttattactgtatccgtaattgctaataaatctgttaaatcctctttaacaaattcatattgtatatatcctgattttttaacttgagcatcttttaatcctttaccagttaaatgtatcacttgatattgttgtaataatgcatctaagttttcgcgaataatgctatttaattttttacttcctaagcttccacccataacgagtaaaacttttttattttcattaaagcctgttaattgataaccattatgtgcattaccattttttaaatcttctcgaattgttgctccaataaaatcagctttctctttaggtaagtagtttagcgtttcttcaaatgttgtatatattttcttggcaaatttaagtgctatcttattcgctaatcctggtgttaagtcagattcatgaataagagttggtatatttaatgatttggctgcaataacaacaggcacagatacaaatccaccttttgaaaataatagatcaggtttttcttttttcaaaactttacgagcatcaagaatacctttcaatactttaaatacgtctttggcattttctaaagaaatatatcttcttaatttaccactcgaaataggataatacttaatttctggtagttgtgattcaatcatttctctttcaataccatttttagaaccaatataaagcgcttcataaccttgtgataatgcagttggaattaaacttaaatttactgatacgtgtccaactgttccccctccggtaaatgcgattttcgtcattaatattacctctattcttttaaatttttataatatgcataaaatggttcacctttatcatatggcggatattccattaattgttcaccgaccttatgaaatccaaatttggcaaataaaccttgtgcaggtttgtttaacgcaaaggtgtccgttaaaataacttctgcaccacgtgctttaactacatcaataacataattgaataattctgtagcagctcctttatattctttcgaaccagttaatcgatgaataacaaaggcgccttctctatttactggccagtcaatgtcatcataccattctgcttggtcttggtcgacaacaataaagccataaattttgtcattttcctctaatacgtacaaataatctttagcaatatcttcttcaaaatgttctaaaagtgggtactgatcgtcccattgctcgttgtcgtgttctttcattaattcttttgcttcttctactagatttaagatttgatctaaatctgacattttacctagacggatcatgtacgtcactccttatatcattatgttaaacatgtttttcagtacatgttaatcttacacactattaacatgctttaaacctttattatgaatgaaaaatagtaattatcacactatgggataaaaataaccaataaaagtatcatataccaattaattgattgttaaaactagtgaataatactatttaaaaagtatatgctcattgcatattaaaccatgaattgttatcagcgatgatagaaattgcgttatttacatcatttgtaaatgtctaatttatatcttttagagttagacgtcaataaaaataaacacgcctcctaaattgctatctttgcaaatttaggaggcgtgtcattaacataataataatacaattttagtagtgtgtatcgcttattttaaaatattaatcaacttatcgagaacatcatcatgtttattagctttttcaactaataactcagtaaatttattattcgtttctttattaaattcaccagttacctcaagtttattcgcttgttggaaagctttaacttgattttctaaagctttatcaaattgcgttgattcattatcaactttataacctaaagctgataaaccaattttaatagttttaatatttttatcatcgtctccaactttaaatgttttcgtattaggaatgacatttaaagattgatatttaggtgtgtcaatagtaacgtctggtttaatgcctttaccgtgaatataatgaccatctggcgttaaccatttcatttcagtatattttaacaatgaaccatccttaaactctcttgtagtttgtacgacacctttgccgaatgtttttgacccataaactttagctttattatagtcttttagcgcaccagtaaacacttcagaagcgctagctgaaccttcattcactaagatggatatatccatgtctttcgcttcttttaacgcatcattagaagtttgaattgcttcagtatctttacctttttctagtttaacaacagtttttcctttatcgataaaaatatttgccattttaacagcttcatctagtagtccacctggattatttcttaaatctaaaacaatctttttcaaaccatctttgtgagcttttagaactgcatctttcaattcacctgatgtatcattctggaatttattaatagtaataactccaactttaccttttttcttatactcaacacttttaacatgaattttttcacgtttaatcttaacgtctttttcttcactacctcgttgaacagttaaagtgacttcagtgttttctttaccacgaacatctttgacaacttcatctaatgctttacctttaattgattttccatttactttagtaatgacatctttaggacgaatgccagcacgttctgctggagatcccttcataggactagtaaccataatttgatcatttttcttttgcatttctgcaccaatacctacaaaatcacctgaaacaccttcattaaaggatttcgtttgttcttttgttaaatattcagaataaggatcttttaattctttgaccatgccatcaattgcagctttacttaacttgtcagagtcctgttttttgtaataatcactatttaagattttatacacattttcaattttatttaagtttgcttgatcagttttgtttaaaccacttattttttgatttataaaaatatatgcaacaactgtgatgacagctgttattaggattgtaccaattaatattgatatgaattgccaacgttttaagtgaacgcgtttcgatgaattagtttcttggtcttgattgcttgttgcaatttcagcgcgttcatcatcggatgaagatgtgtgttgcttatcatccattgtatcacttccttattatgtattatgtacttttaaattctgtgtagttaatcatatcaatttatgcaagatagcgcaccatatttcactataattgattaatttttagtcacaacttagtttattttaaattaaaaccaggataacgaattgcatcaccctggttctaactattattattaaaaattatattaaaattttagccattccgtatattcttcatataaatcatcaaatacagacattggcaatgtgaaatcaccatgtgtctcaatataatcagacagtatgttaaaatcatcatcgtgttttgggaaagcaagatcgtcaaatatctcttctgctagacgacctttatcgtcgtgtcgaccacgaactgtcatgacaaattgataaaacgaatagtttttcattagttcattgtcacatcaatcacttttgtttcacctttaatcacagcattttcatcataaatattaattgaagctgcttgatcagtgttagtaattataattggtgaaattacagatttagcgttattattaatatattcaaggttgaatcttactaatggatctccgacgttaacttcgtcaccactagacactaacacttcaaatccttcaccgtctaattgaactgtgtctaaaccgatatgaactaataattctaatccgttatctgcttttaacccaatcgcatgcttagttggaaagacattgtcaacacgtcctgcaattggagacacaacttctccttcagttggattaataccaaaaccttcgcccatcattttttgtgcgaatacaggatctggaatatcttcaattttcacgaattctccagttaatggtgcataaattgcgatatctttctgaacttctttgccttttccgaataattttttaaacatactttccactcctacttatcaaaatgtgatattaaatcgccataacccaattcttctaacttttcatatggaataaattgaattgcagcggaattgatacagtatcttaagccgccactttctttaggtccatcattaaagacatgtcctaaatgactatttgattcttctgaacgcacttcagttctcaacataccaaatgatttgtcgactaattctataatttcatcgtcatcaagcgctttggaaaagctaggccatccacattcagaatgaaacttttcttcagatgtaaataaaggtttaccagaaattttatctacataaattcctttagcaaaatgattccaatattcattcataaatggtggttcagtgccgttttcttgtgtaacaatatattctatatctgttagttcacttttatcttttttaagcattttgattcccccaatgtgattctataaacgcttttctacctgaaccacgttgatattggtaataatgtaccgggttctttttgtaataatcttgatggtagtcttcagctggatagaaatttttatatggtttaataggtgtaatcactggtttcttgaaaataccttgttcatttaattgttgctttttaaactcagcagcctttttctgatgttcatcatgatagaaaatgactggttgatagctttcgcctctatcgaaaaattgcccttgatcatcagttgggtcaaatgttttgaaatatatgtctaatatattttcaaaggaagtaacctctggatcaaacgtaatttgtactgcttcgacatggccggtttgattcgtacatacctgttcataagttgggttgtcaacatgaccgccactataaccagatacgactgacttgatgcctggatatgatgtaaatggtttaaccatgcaccagaaacatcctcctgctaatgttgcatattcttttgtcatatgaattacctcctctatctatctaattataaatttagtctataaaggattgaaatggaagtaattaacactgaaaagattaaatttacttcttaaggactacgaggccaatcgcaccttgaccagtatgtgcagaaataactggtgtagttacatttatatcgtaattattcacatgaaaagcttcattaaaaactttcttcaatttatcaacatattcaatgacgttagcatgtgcgacaccaatggatttgatttcatgatctcctataaattcagcaatttcctttttcaagtattggatactagaattttgagttctcgcattgtgcacaagctctaagcgaccatcatctagtgtaccaattggtttaattttcataagattaccaatcaaaccttttgttttactaattctgccacctttaattaattgattcaattgccctataactacaaataatttaatgttttctcttaaatgatttaactttttaactatttcagaagttgagacaccttcttttacaagctctactaggtgttgtatttgataccctaaaccaaaagaaatagattttgaatcaataacagttacattagcatctaccatttgacttgcttggtaagcagtgttatatgtaccacttaatcctgaagaaagatgaatacttatgatttcagagccatcttttcctagttcttcataagcagatataaattcacctatggctggctgacttgtctttacatcttcatcattttcaatatgattaataaattcttctgatgtaatatctacttggtcaacgtatgaagctccttcaatagttaaacttaaaggaattacatgaatgttgtttgcttctaagtattctttagataaatcggatgttgagtctgttactataatctgttttgtcatggtcgttttcccccttattttttacgaattaaatgtagaaaggtatgtggaattgtatttttctcatctagtttaccttcaactgaagaggcaacttcccagtcttcaaatgtataaggtggaaagaacgtatcaccacggaatttaccttcaataacagtaatatacatgtcgtccactttatcaatcatttcttcaaataatgtttgccctccaaatatgaaaacatggcccggtagttggtaaatatcttcaatagagtgaattacatcaacgccctctacgttgaaacttgtatctgaagtaagtacaacatttcgacgattcggtagtggtttaccaatcgattcaaatgtcttacgacccattactaaagtatgacctgttgataattttttaacatgcttcaaatcatttggtaggtgccaaggtaattgattttcaaaaccaattactcgttgcaagtcatgtgcaactagaatggataaagtcataattatcctccttcttctatcatttcattttttattactaagttatctttaatttaacacaatttttatcataaagtgtgatagaaataatgattttgcataatttatgaaaacgtttaacacaaaaaagtacttttttgcacttgaaaatactatgatgtcattttgatgtctatatggttagctaactatgcaatgactacactgctattggagcttttattgctggatgtgattcatagtcaacaatttccaaatcttcataatttatgtcgaaaatagacttgtcactgttaatttttaatgttggaggattgaagctttcacgtgctaattgtgtttgaatcgcatcaatatgatttgaataaatatgtgcatctccaaatgtatgcacaaattcacccacttcaagtccacattctttggcaataaggtgtgtcaataaagcgtagcttgcgatattaaatggcacacctaaaaagatatctgcgctacgttggtataactggcaacttaacttaccatcttggacataaaactggaacatggtatgacaaggcggaagtgccattgtatcaatttctgttggattccatgcagatacgatgtgtcgccttgaatctggattatgcttaatttgttcaattactgttttaagttgatcaaaatgattaccatctttatcaacccaatctcgccattgtttaccataaacatttcctaaatccccgaattgcttcgcaaatgtatcatcttcaagaatacgttgcttaaattgtttcatttgttctttatattgttcgttaaattcaggatcactcaatgcacgatgcccgaaatctgtcatatctggacctttatactcgtctgatttgatataattttcaaaagcccattcgttccatatattattattatattttaataagtattggatgtttgtatctcctttaatgaaccataataattcggttgctactaatttaaaagaaactttctttgtcgttaatagtggaaatcctttagataagtcaaagcgaagttgatgaccaaatttcgaaatcgtacctgtatttgtgcgatcatttcgtgtatttcctatttctaaaacttcttcacaaagactgtgatatgctgcatcaaatgaattcaacatatgcgataacacctcattttcattatttatagtatgtatatttagtttgatataacttaactttatgtagcattttgttatcactcattttaggaatatgatattaatatcatgaattccgttactttatttataaaatgctgattaagtacctaccccatcgtaacgtgatatatgtttccaattggtaattgtttacccaaatctataactttaatgctaaaaaattttaaaaaagaggttaacacatgatttgaatattatgtttgatgtcctattaaaacagttaaatttctagaaaatatagttggtaaaaacggactttatttaacaaatagaatacaactatattctctattttcaatgacagacaccatttttaatattataaaatgtgttaacctttatatttatttatgtgtactatttacaattttcgtcaaaggcatcctttaagtccattgcaatgtcattaatatctctaccttcgataaattctctaggcataaaataaactaaatcttgacctttgaataaagcatacgaaggactagatggtgcttgctgaatgaattctcgcattgtagcagttgcttctttatcttgcccagcaaaaactgtaactgtatttgtaggtctatgttcattttgtgttgcaactgctactgcagctggtcttgctaatccagctgcacagccgcatgtagagttaataactacaaaagtagtgtcatcagcatttacttggttcatatactccgatactgcttcgctcgtttctaaacttgtaaaaccattttgagttaattcgccacgcatttgttgcgcaatttctttcatataagcatcatatgcattcatatttaattcctccaattaaattgttctgtttgccatttgtttccatactgaaccaagtgcttcatctccgttttcaatacgagatatggccatttcaatttgtaatttaacttcaaacgcattgtcattaatatgggcttttagtgcgggaagctgctctgcattaccttcatcaaagataaacatagcagcacgccacctaacgattttctgtggatcatctaatagtagcaccatttctggtagtgcctctggataccctaaatcgcttatgcaatcccctgctgttcttcttacaacaggacttttatcacgaagccccttatataaatacggtaaaatttctttactttcaatcatacctaataatacaatcgcttgacgtctaaccggtactttttcatcagataaagctaaatcaagcagcggtatatcttcaaaagtcggctttggaaaatggtttaacattcgtaatcgagtcttccaattatcagttgcatgatattcatccaaagagacatgtcgatagaaatgataattattagttgcgtgattttcttctaaagcatgttttaccaatacgggtaactgtgattctggataggtagttagcacttcttctaggacaccatccattacttcttgaatatttccatagcgatttcctaaatctagccatttacgcataaaaacaatattgtcatgtgctgtttgcgcttgagtcatatggtcaacatatgtttgtggtaattgttctcttaattcttggtcagcagaagttagcttaatttgatacggtatacccttaaaagttaataattcagctttaatttcaccaaaatgattgtcaatttgaggttcatttacagattctaaaaccttattcgcatcagaaaaagcagctttaatatcaggtaatatgacttcccaatcagcttttggtgccttatcaacagctaagaagttcatgacatgaaaaatggaagtgataccatctatagataacaactgatttataaatcttggttgtgtttcttctacttttttataagtattagataacttgtcttctcttgtatatgacaaaacaactttcattgtatttggacttggtgttggctctatacgtaaaatttccatatactttattccccccgaatactagttgatgaaaaatttattcgaatacagcctctacttttggcaatactgtttcccaatttgcgtcattttctttatctactgaaataaagtccataacatggaaaattgatttaacgccttcaacctttaagatgtcattaataaatgctggctgtgaatcatcaactttagtatacgtatctgatgtcataccttctctgctttcactaagtgtaatcttcattgtgttgtggttcggtgtttctgatatagatataattttcatttgacttcctcctattgaagttcatttcctaattgttttatttctttccctattgaacactcattgatacaaaaatgatgcgccttcgttttcccctctaatttacgcagacgagttttgattggacattgattgcaataagtattcattaaatcatctattttcgcgagtgcattttgctctgaaaaagttaaaatacgcgacacttcctttattacttcaaaatattgcaaccttgtaaataagtgttactgttttaaatttgacataaaaatattataacatttttgaccctaagatttgaatgaaaccttttacaattctatacgtaaaatgtatttatattcaaatgctattgcatcgcaaacgatttttcagtaaaatgagttagttatttattgagcggtttctaaacacccgcatgatcaaaatttaggaggacattttaatatgtataatgaaattttaggactagttacgtttattgcaacgttcgtgcttatggtacttatgtatcgcttttttggtaaacaaggtttaattgcatgggttgcaattggcacaatcattgccaacatacaagtgattaaaactgtagaaatctttggtatttcagcaactttaggtaatgtcatgtttgcttctatttatttagcaacagatatattaaacgatatttatgggcgtagagttgcaaaaagagcagtttggttaggcttttcatcaacattaattatgattattgttatgcaattgtcattacattttattcctgcaccagaagatatggcacaaaaagcattacacgcaatctttgatgttgtgccacgcattgctttaggctcaatcgtcgcatatattattggtcaacatattgatgtatttatcttttcactaattaaaaaagtatttagttctgataaaacgtttttcatccgtgcatatggtagtacatttttaagctcaataattgatacagctttatttgtagctatcgcatttatcggaagtttacctggtacagttgtatttgaaatatttattacaacgtacgtattaaaattagcttcaacagttttcaatgtaccatttggatatattgctaaatcattttatcgtaaaggtaagattgataagttagatcaaggctattaacgcacttactacacaaaagaataagttttaagggagtgggacagaaataatattttcgcaaaatttatttcgtcgtcccaccccaacttgcattgtctgtagaaattgggaatccaatttctctttgttggggcccatcccaaacttgcacattattgtaagctgacttttcgtcatcttctgtgttgggacccacaccccaactcgcattgcctgtagaatttcttttcgaaattctctgtgttggggcccctgactagaattgaaaaaagcttgttacaagcgcattttcgttcagtcaactactgccaatataacatcgtagagcatagaacattgatttatgtcccagcctgaagatgatttttttaggaagtatattacagtactacgtattagaaaatcatctttgaatcagcgagtattttaaacacgtgttacttatttaagtgatgcgtgttttttaatggattacccaacatattttgtattacagtaatagtaactttaactaagtattgaatagaaagtaggtttattatggcgaaaataaattttgatgctgcgacgaaaggaaatccaggcataagtacatgtgccattgtaatcaaagaagatgagcagcattatacatatacacatgagttaggcgaaatggataaccacactgcagaatgggctgcatgtatttatgcactagaacatgcacgtgaattaaatgttcaaaacgcactattatatacagactcaaagctaattgcagatagcattgaagctggttatgtgaaaaacgcaaatttcaaaccttattttgatcaaatagaaatatttgaaaaagattttgatttattatttgttaaatggataccgagagaacaaaacaaagaagcgaatcaacacgctcaacaggcattgtataaattaattaaaaagaataaataaaaggagcaccgactgatgtgatgtcaatcggtgctcctctatttatcaaagaaacaaattattttttatttttcttagctttctttttcttctttttagctgctacctttttagaagtattttttgatgctgactttttgtctttggattggttatctttttgatttttctttttagccaataataaaggaacgtcctcatctttagattcaatactagttgttgtttcaacatcttcctctttatctttgcgtcgttttgcgaataagagtggtgaatgttcgttatctttcaacactttttcatctgtgttttcatttgtaacttccacatcttcttcatcttctttacgacgacgttttggtaagaagaacggcgtatgtttaactttatcgagtgactcgccattatttagcgaatctttttcttcaacagtaacatcttcttcatcttcttttctgcgacgtttcgcaaataaaagtggtaaatgttttgtatcgtctaaagtctcttttattgaatctttattattatctcttatttctaattcttcctcttcatcttctttacgacgacgtttggcaatgaagaaccagaaactagctagtaaaccagagatacccaccacaccaatagcgtttttaataacattaccgaaattattactaaagtgacgcatatgaagtggatcaatgtcatcatcttcatcaagtttctttttatgtccaatagtcgaactgttaaatggatgatttgcagttccataaccaattgttaaatggctattagattcatttccagtacttgacgattgtttagcacgatcagatgttacaatttgtactgctgaaattcgagcaataccattgttcaatgcagcctcaacttgctgtaatgtatgcgcattattaatatctctaattgtttcaagcacaatttcgttaatttgattcattgctgcttgtttttcatcagctgtgccaatttcactatttcgaatactatttattttttcatttgaaaagtctttaattctactaatagcttcttgcttgcgtttagctagttcttttgctgttggattagctgctttcatttgagctttaaattgttccaattgctcacttatttcatcgatgctttgcgcacgttgaatcgcttgaattgcttgttcttttaattgatttaacttagcaatagcttcttgcttctctttatctgttagatcagtacgagctttgatttcatcaatcatatgttgaattgcatcttcaatcgatttaattgcatttgattttgcttgttcaatcgtaaattgttctggattaaattgttcaatatgcgcttgttcttgttgttgaatttcttcaactgaatgaacatcaggtgcattgttaacatgatcaattgcttgttgtttaagcttattaacttctgcaattgcagcttctttttgttccagtgttaatgtcacactattattgatttcattaatcttttgttgtgccgcattttcgattgattcaattgcctgttgtttgactactgacaattctttttctacaacttttacaggaacattaacaatcacttttgatccatcaagcaatgtaacttcaacttttgctgttaagctatcagaaatcgttgcagttgatggtgtatcgatgacttctgctgaaagctgatcaattaagtttatgtgtgcaagaatatcttgttctgtaatgatgtcatcacgatgtacaatgagttcaccattaactaggatttgctcaggtgttgcttcaaaaatttcatttacagcaggttgttcatcaacctcccatacatgtgtatttctaatgtcatctaaacctaagtttaatcctcgatttaattgatctatagtttgagcattctcaacgttttgtagtgctcgtttttcagcttcgtcaatttctttgagcgcttttgctttttgctcaggtgttaaatctggatttgaattgatttgatcacgcttcgcattagctaaggcttttattgcatttttcgcatcttctttagctttcactaaatctttgatgtcttgcaatgcttgtgcaagttgtgcttttgcctgctcaatttcttctttagtcagcgcattgttaatgtcgttatgaccttgttgaagtatttgattaattcgatatttaagtgcttgtttttccttatctgttagatttggattttgatcgatttcgtcaattaaagcttgaacttgtttatcaacatcttgtttcgcatcttctttagctttcactaaatctttgatgtcttgtaatgcttgcgcaagttgtgctttggcttgttcaatttcttctttagtcatcgcattgttaatgccgttatgaccttgttgaagtatttgattaatacgatctttaagtgcttgtttttccttatctgttagatttggatttcgatcaatttcgtcaattaatgcttgaacttgcttatcaacgtctttattggcatcaatttttgcttttggtatttcattggcatgcacttgttcaatcgcgtggttgcctgctgtttgaacttgagatacagcctgattacttgttgctttattaatgttgttgatgatgctgtttgccaattcttctgctttatttttcgcaataagcttgtcttgatccgtcgcatttgaagcttcgatttcttttagcttattagctaaagcttgattaatagattgaattgccttgtctttagcatcttgtagtcgttgatcaccattaagattatggattgcatcattgactgcttggattgcgccattgatatcattcacatttgtgttatcactatttagcaatgtatttgctagacgtttggcatcatcgaagtttgttttagcattatcgtcagcgttttggtaattgacagtttgctctgcatttggaatttcattgtcaactaaatgtttcaatgtttccattgcatcatttaagtcaatttgattattaacaatatctgttacatctgatacagtatcggcattgttaattgctttatgtgcaagatcttgttgctgttgatttaatccatttaacgaattaacaaacgcatttgctttatctttggcatttgcaaggttttggtctccatttaatgcattttgagcatcgataatattttgtttcaattgctctgcttcagcttttgcaattgcattaccttgcactttatctaactcatgtgctgcattcgcaattgcattatcataatttgctttcaaattgtcatctgcattgatgtaatttgtgctgctgataacaccaaggtgctgttcgtcaatatattgttgtactgcacccattgcattatctaatttagttgctctattaattgctcgagatgctttatttagcgtttcagcattattaatttgttggattgctaattgtctttgagcattgtttagatgtgttaattgatccaatctttgtaatgcttcagctttacgattattaagtctttcttcaccatttaatgctttcttagctgcagtgactgcatcatttaatttgataacttgttttgcagttaagttttgaccagtcgatttatcaagtgcttgtttcgctttatcaaccgtttcatcatatacttgtttgacttgtgtatctgcattgacatagttcgtgctacctttcgtgcgtccttcattgtcagtgatttcttgtgacaattgatccattgcacgattaagtgccttagcctcatctacaatttgttggatttgatttaaatcgtttgattgatcgatgcgacctttaaatccatcttgttgagcattgtttaatgcattcaattggtcgatgtcatgtttaccatttgttttagcaagtgctacacgttcatcaccatttaatgcttgttttgcatttaaaatattttgaagtgcttgatccacttgttgcttattcgcattttgtttcaatacattttcagcatcagcaatagcttgtttataagcattttgtttatctgaatctgcttgtgtgtaatctacagtttgctcaacgttagcatgttcattaactgcttgttgtaattgatccatagattgattcaattgcgttgcttgatctactaattcagcaattggttgaagtttcgtcgcttgatcaatgttttgtttagcagttgcaatttgatcagcatttaaatgtgttaattggtcaatagtttgtttcgcttgtgttttagcttcagcgactctctcattaccatttaactcattttctttttcttgaagcttagttaatacttggtctacagcgtctttattcgcatttgaaccattagttggatctgtaatgctttctgcagcttgtaacgcttgatctactgcttcttttttatcagttgacgcttcagtgtaatttggttgagccttatctgtattcacttgatcaactttatttttcaatgtttccatcgcgtgatcaagttcagtagcagtttgaacatgttgtgcaacctctgttcttgtaggcgctgcatttatagcatcagttaatgcttgttgttgtgcatgatttaagtttggcaatgcatttacagttgttactgcttgttgttgatcacgagcaagtttttgatcaccatgtagattatcttttgcagttgttactgcttgtgtcaattgttctacttgtgatttgtcgagtgttggattacctgtttggttaattaaatcttttgcattttgaactgctgcttggtaagcatctttttgcggtttatcttcattgataaacttgctaccagattctgtttgttgttgatcttgaatactattacgtaatgcttgcattgcttgatcaagcgcttttgcttcagctaatttttgtgctacttcgccacgagttgctgcgttgtttatttggctttcaagtgcttgacgttgcggattattcaaaccatttaattgatttaaatcagtaaccgcatgttgtttatcgtctgcaagtttttgatcaccgtgtaggttatctttagcttggttaacagcttgtgtcaattgttcaacttgtgctttatcaagcgttggattgttagtttgattaattaaatcttttgcattttgaactgctgcttggtaagcatctttttgtggtttatcttcattgataaacttgctacccgcttccgtttgctgttgatcttgaatgctattacgtaaagcttccattgcttggttaagtgcttgtgcttcagttaatttttgtgctacttcgccacgagttgttgcattattaatttgattttctagcgcttgttgttgagctggtgttaattgatctaaatgatttagagaatttccagcagtttgcttatcttgagctaatcgttcaacaccatctaatgcatttttagatgatattactgcttgagtcgcacttgatacattacctttattgatagttggattatttaatcctgcaatgatagactcagcattttgaactgcttcatcataggattgttttttattcggttctgcattgacatatgcactgctcgcacgtgttgcatctttgtcagcaatactttgttgtaatgcatccataagttgatctaatgcttgtgcttcagtcaaatcttgcttaactgctgttctagttgtttcactatcaattaacgtatcttccatatgtttttgtgcattgtttagatgtgctaattgactaaccgtttgcttagcatgatctttatcattttgtaacttcacatcaccatgtaatgctgctttcgttgtattcacagttgtcgctgcttgattaatcgcattattatctaatgttgcagtttgttcattgataatattatttgcggcttgaacagcttgatcatagttttgttgctctggttgatcttcgttgatatatttgctatttgctttagttgctgcgttatcttgaatgctctgtcttaaaccatgcattgcttggttaagcgtattcgcattttgttcaatttgatgaactgcagttactaaagttgcagctgtaacttggtcttttaatgctgttttttgaggatcatttaagcttgttaaagcatcaattgcttgcgtcgcatttgttttagcaacttgtaaattatggtctccatttaacgcttgaagtgttgtttgaactttagtaatagcttgttctacttctgtttggttcgcattttgaccagtttgtttgttaatcattgctgctgcttcatttaccgctgtattataagcagtttgtttatcagtatcagcattgatgaagttaccacgttgttcaacggcttgatgatctgcaatcgcattaattaagttacccatcgcagtatttaaagattctgctgtttgtttgtgaccattaactgcagcaatatcagatgattgcgtaatttgtgattgtaactgttgcttttgcgcattattcaaatgatctaattgatcaagtctgttgtttgcttgttgtttagctgctgcaaggttttcatcaccatctaatgcaactttcgtattattcacttgtgtcgttgcaccattaacatcatctggattcatcgtaggcgatgtagtttgattaatgatattattagcagctgttacagcttggttatagtcattttgtctttgcgcagttgcatcatgataatcttcagacgctaatgtcgtttgattatccgcaacactatttcttaataattccatcgcatgatctaacgtttgtgctttttgattaatcgtagtgacatctgtaacaagtggcgcttgtgtaatttgactttcaaatgattgtttttgtgcatcatttaagtgtgttaagttcgccaattgttgttttgcttgttgttttgcatttgccaaattgtcattaccatttaatgcttgtttcgctgcgttcacttcattagtgatgctttcaacttgtgcttgtacttcattagtaccactttgtttattcaataatgcttcagcttttgctactgcctgtttatacgcattttgtttgtcaggatctgcatttaagtaattaccgtccgctaatgtttgagctttatcattaatagcttgtgataattgatccattgcttgatctaggctcgttgctgtttgtttaacttggttcactgtagcaatttcaggcgattgatcgatttgaccttttaatgcttgtttttgagcatcgtttaaatgcgtcatcccacttacggcatctttagcattttgcttttcagttgccaatttagcttcaccgtttaagccatttttagcatcagtcacttgagttaatgcacgtgttatttcatctgggttaagcgttggatttgtcgtttgattgataataccttccgcttgagacactgcatttgtatatgctgtttgcttatcggcatcagcatcatgatagttctcacttgctttgacagtatctttgtttgcaataccttgtttcaagttactcattgctgtattcacattttgtgcattttgtttagtttgttcaactgtagctaacgcttgtgcttgattgatttggttacgtaatgcatcacgttgtggttgatttaaatcgcgtaacgtatcaagatttgctaaagcttcttgtttcgcttgtgctaatttttcatcaccgtttaatgcatctttcgcttgattcatagttgtcactgcttgtgttactgtatcaggcgtcaatacaggtgttggtatgccatttgcgatttgttgcgcttggttagccgcattgttatatgcttgttgtttgtcttgatccgcttgtgtaaagtcaactgactgtggtacttgactgttcgcttgaatttgttgtttcaatgtacccattgcattatttaacgcatcagcattttgcttaatagcattaacacctgtaacaagttctgcatgcgacacttggtcttttaatgctgttttttgtggttgatttaagtttggtaactgatcaatggctgtatttgcattgtctttagcaacttgtaagttatggttaccgtttaaatcacccttagcttgattcacttgttgtaacgcttgagccacttgttgtggatccacgtttgcatttggtgtaccactaattatttgttcagcatgtgctaccgcattgttgtaagcattttgcttatcagtatcagcattgacaaagttaccatttgctttagtttggtctttatctgcaataccttgtttcaattgtgtcattgcttgatttaaatcttgtgctgtttgcttaatcgtgtttacatttgcaacagtttgcgcagcatcgacttgttgttttaatgcatctttttgcgcttgatttaaatcatttgcatttgtaatcacttgtttcgctgcatcttttgcacgttgtacattgtcattaccattcaatgcttgtttcgcttcgttcacacgttgcatcgcttgttccacttcagtttgacttgcattgctgccatttgctttagataaaataccttctgcatgtgaaaccgcattagtataagcatctttcttagcttgatctgcatcagtaaagttaatgctatttaatgtctcagttttatcttgtaatgcattgtttaagttagtcatagcattattcagattttgagcattttgcttaacattattaactgttgcaatatctggtgcttgttcaacttgagttgttagcgcttgtttttgagcatcatttaaatgatctagtgtaccaagtgttgtcttagcatcttgtttggcatcagctaatttttgattaccgttaagtgcttgatttgtgtcattcactttagttaatgcttgttgaattgtatttggatccattgttggatttgttgtttgttttaacaattcttctgcttttgttactgcattatcatatgctgtttgcttgtcagtatcagcatcgtgatagttctcgctacctttaatttgtgctttattcgcaataccttgtttcaattgtgtcatcgcgtcattaagcgttgtcgccgcttgttgaatagcattgacgtttggtacaagtgttgcttgcgtgatttgtttgctgtattcatcacgttgcgcttggtttaagtttggcaattgatcaatagcatgttgaacattttgtttcgccgttgctaagtttgtattaccatttaaatcatttttagcttgcgtaactttatttaacgctgcagtaatttcgctaggtgtaacgacaacatcaggcgtagcactaattaatgcttcagctttcgctactgcttgattatatgcattttgcttatcaggatctgcattgacaaagttaccatcagcttttgtttgttctttatctgcaatgccttgttttaattgtgtcatagcattgtttaactcttgtgctgtttgtttaacattgtttacaccagctacagtagttgcattttgaacttgttgttttaatgcgtctttttgtgcttggttaaggtcattagagctattaattaatgctgttgcttcgtcttttgcatgttgaacgttggcattaccatttaatgcttgttttgcagcattaacttgtttgattgcttgttcaacttcagcttgtgttgcattgccgccattagcttttgaaatgatattttcagcatttgtaacagcagtgttatatgcttgttgttttgcttgatctgcatcagtgaagttaactgtcgctttcgtagcatctttgtcagctatcgcttgtttcaagttacccatcgctgtatttaagttttgcgcattttgcttaatttgatttgcttcatcaacagtatgcgcgccattaatttgatcagtaactgtttgtttttgcgcattatttaagttatctaatgaacctaatgattgtgacgcttgttgtttcgctgcctctaggttttcattaccatttaatgcatttttagttgtgcttacttgtccagcagcttgattgataacagtcggatctaaagttggacttgtagtttgatcaataataccttgtgcagttgtgacagcattattgtacgcatcctttttattctgacttgcatcagtataattttggttttgttttgttgtcgcattatctgcaatactttgacgtaatttgtccattgctgcatcaacattgtttgctttttgctcattaccttgtgcttctgcaacagtagtcgattgttgtaccaattgttttaatgcctctttttgtgcatttgttaaatggcttaaaccgtcaattgctgtatttgcgtgttgtttagctttttcaaggttttgagtaccattaagcgctgcttttgtagcattcacttgattcatagctgcttcaacttgatctttaggcacgttcgtacctgtagatttatttaaaatattttcagcattatgaaccgcttcattgtatgcatttttcttctctggatctgcatctgcaaagttttgactgccaagtgtagtgtctttatcattcaagctatttttcaagttacccatcgctgtattcagttcctgagcggtttgaatggcttgcgttacttcagctacagtgtgcgcttgattgatgtttccagtaacagcacctttttgtgcattgtttaagttatctaacgtagataatgtttggtttgcattgtttttagcatctgttacttttctatcaccattcaacgcttgtttcgtagttgttacagttgaaagtgctgcttcaacttgtgattggttcgcatttgtaccatttgcttgattaataatattttcagcagcagttaccgcattgttgtatgctgtttgtttttctggatctgcatctgtaaagttaacactttgtttcacttgatctttgtcttggattccgttgattaaacgttccattgcttgatctaattgttcagctttagttttcacttgatttactgtgctaatatttggtgcatttgtcacttgcgtatttaaatcttgcttttgagcattatttaaatgacttaattggttgatgttagcagtcgtttcttgctttttattcgctaagttttgtgcaccattaagcgcagttttgttagtgctcacttgattagctgcttgtgttactgcagatggatcaagtgtcggctgactcgttgcattaatgatattttcagcatttgtaactgctgtattgtatgcattttgtttatctctatctgcatcaacatatggttgactcgcttttacatcatctttattcgcaatactatttcgaagttgattcattgcattatcaagatttgtcgcgttgtctttcacactttgaacgccagttacttgtgtcgcgctatcaatttgaccagtaatactttgtttttgtgcatcagataaatgtgtcatttgacgtaatgcatctttagcttgttgcttcgcagttgctaagtttgtatcaccgtttaaacctgtttcagcattattaacacgttgtgttgctgctgtaacatctgctgcatttgtaatcacattaggcgaaccatttacaatgtttttcgcagcattatatgcatcagtataagcaccttgcttatcaggactcgcgttagtgtaattaccactagctacaattgtgtcatgatcagcaattgcttgttttaattgatccatcgcattattaagtgatgtagcactatttttcagatcagttacacctgatacacgttgcgcagcgttcacttgttgttttaatgctgttttttgtggtgtattcaaatgtgtcaagttatcgatagcttgtatagcttcagttttagcgcgttgtaagttcgcgtcaccgttcaaagcattttcagtagacgttacactttgaattgcttgttcaacagcttgcttatctttattcgcaccgtgatctttatttaagtaagattcagcttgtgtgatagcattatcaaatgctgttttcttagttggatctgcgtcgatgtaattttcgctcgctttagtttgatctttatttgctatagctgattgtaatcgttgcattgcaccatctaagtcttgtgctttcgttttaacaccatttacaccgttgactgttgttgcgccttcgatttgtgatgttaaatcttgtttttgtgcattatttaagtgtgttaatgtacctaagtttgctttcgcatctgattttgcttgtcttacatttgcgtcaccgtttaaagcattcttagcagtcgttacttgatttaatgcagcttcaacttgtgctttcgtcatattttgaccgtgtgctttatctaaaataccttgagcattcgtaacagcatttgtgtaagcatctttcttaccttggtcagcatctgtaaagttcacttgttgtttaacagtgttttggtcatttataccattttgaagttgacccattgctgtatttaattcattagcagtattttgtgcagcagttacgcctgctactgtcgttgcattgtcaatttgactaattgctgcagttgattgcgcattattcaagttactatatgaagctaatgcacgtttcgctgactcttttgcttgagcaactttattatcaccattcaagtcatttttagcttgattcaattggtttagtgctgcttgaacttgtgtttcattcgcgttgctgccattagcattagtaattgcttctgcttgtgtaaccgcagtatcatacgcttgttgttttggttgatccgcatctgtgtaattgacactacgtttcgtattatccttttcagcaagtgcatgtttcaaattacccatcgctgtgtttaacgatgttgctttatttttagccgctgtgacagctgcaagatttggtgcttgatccacttcagcatttgccgcagttcgttgtgcattgttcaagtctgtcaaacgaccgatatctgatttcgcagtttgttttgctgctgctaatttttcatcaccgttcaatgcagacttcgcactgttcacttggctcgctttttggttaattgtatcaggattcatttcagggttattcgttgcactaataataccttcagcattagttaccgcatcattgtatgcattttgtaaatctgcattcgcgtcttgataatcttcgcttgatttagtcgcatctttagaagcaatactttgtcttaattgattcattgcttgatctaaagtaccggcattagcttgaataccttgaacacctgcaacagtcgtaccactttcgatttgcgatgttaagtttgctttttgagcatcagttaagtgtgacattgtcgctacttgttgtttagctgtgttcttcgcttcatttaatcgctcgtcaccatttaatgctgttttagcagtattcacacgttgtaatgcttgttcaacagctgctttattgtcatttgaaccagctgttttatctaataacgttttagctgctgttacagcgtcattgtatgcagtttgtttttctctatctgcatcagtatatttctgagctgcttttgtagctgcttcatcattaataccattttgtaagttgctcattgctgtatttaattcagatgccgttgtagacacttgatttacacctgcaactgttgtcgcaccttcaatttgtgatttcaatgcttctttttgtgcattattaattgatgttaggttattcaatgcatttttcgcagttgtcttagcgttcgcaacattttgattaccgttcaattcgtttttagcacgttgtacattttctaacgcagtttcgacaccgtcttttgaagtatttggaccttgtgctttatttaaaatttgttcagcttgcgtcactgcatttgtatatgcattacgtttcgcttcgtcggcatcagtgaagttaacaccttgcttaatcgtattctgatcttgaataccatttttcaagttcgtcatagctgtatttaatgcatccgcattattttgtgcttgtgttacttcattaacatgcgttgcaccttcgatttgacgtttcactgcatctttttgagcgtcagttaagtcacttaagccgttcaaatgttgcttcgcatttgtttgcgcagttcttaagttttcttgaccgtttaacgcttgttgtttagctgtcacttggtctttcgcttgattaatttcttgcgcattcattgatggactagttgtttgaccaatgattgcttttgctgcagtgactgcactgttgtagtcagtttgtttgttttgacttgcatctgtgtagttttgacctgctttaatcgttgcttcattcgcaatgctatctcgtagacctttcattgcagtgtttaatgtttgtgcattatcacgaacagtttgaacatttggcaacgtcgtcgcttgacccacttgttctttaagttttgctttttgcggaccatttaaagaagttaaaccatcaattgcagtgttagcattttgtttcgctacttctaaattatgattaccgtttaactgcgtcttagcattcgttacttgcgttgctgcatttgtaacatctgctggtgttaacgttggtgttggtgtaccactaacgatattttcggcagctgtaactttttcatcatatgcttgacgtttattcgcatcagcattgacatagttaccactagcttttgtctcagctttatcagcaatggcacgctttaaagctgtcatcgcagtatttaattcagtcgcagtatgttcaacaccatttgctgcagatacacgtcctgcacttgttacttgtgcttttaatgcttctttttgttttgtatttaagtccgaagcatttgtaatcgctgtgttagcagcctgtttcgcacgatctaagttttgaataccgtttaatgcagtatttgcttgtgtaacagcttgcattgctctttcaacatctgctttaggtgtattaccgccagctgttttatttaaaatagttgctgctgcatttactgcttgagaataagcagttcgtttagcatcatcagcatcttgataattttgactttgtaacgtcgtgtctttatcacgaattgatgtttctaattgacccatagcaccatctaattgttgcgctttggctttaactgtattaacaccttcaacatttgttgcttgtgtaatttcattgtctaacgctgtacgttgtgcattattaatgtgtgttaatgtacctaacgtttgtttcgcagctgctttagcttcatttaatttcgcatcaccgttcaacgccgtcttcgtactgttcacattttgcaatgcttgttcaactgctgctttgtctacattttgaccactagcttttgttaaaattgctttcgctgcatttactgcttgatcataagctgatttcttacttggctctgcatctaggtatttctgagtttgttttgtttgtgtctcatcattgataccattttgtaaactatgcattgcgttatttaattctgttgcttttgcagtttcttgatttacaccagctactgttgttgcaccatcaatgctacgcgttaacgcatctttttgtgcattgttaattgatgttaagttattcaagttgtttttcgcagttgtcttagcttgagctaagtttcgcgcaccatttaatgcctgttctttagttgtcacttgtgatgttacttgcgtaatagtatttggttccatcgttgggttcgatgtttgattaatgattgcttttgctgcagtaactgcactgtcgtactcgttacgattatttggacttgcgtcagtgtagttttgacctgctttaattgttgcttcattcgcaatactatctcttaagcctttcatcgctgtattcaacgtttgagaactatttttaacagtttgaacaccatctaatgtagttgcactttgaacttgttcttttaattttgctttttgtgcattattcaattgtgctaagccgtcaattgtattgttggcatgctctttcgctacacgtaagttgttatcaccatttaatgctgttttagccgcattgacttgtgatgccgcactatttacgtcattgactgttaatgtcgcattcggtgtaccactaatgatattttcagcgttagtcacttttgaatcatacgcttgacgtttttcttgatcagcattgacataattaccgcttgcttttgttctttctttatcagcaatagctgctttaagtgctgtcatcgcactgttcaattcagttgcagtgtgttgaacgttatttgcatcagatacacgttgtgcattgttaacttgtgtttttaatgcatctttttgtttttggtttaagtcatgtgcgttgttaattgtgttcgtcgcatttgttttagcttgagctaagttttgtgcaccatttaacgctgcttttgttgtattgacttgatttgccatgccattaatcgcattagcatccatatttggattgttcgttgcattaataacaccatttgcattatttacagcagtattgtaattatttttgttgctgtcagatgcatcaagataattttgacttgttttcgtcgtattatcattttggatacttgtacgtaatgcacccatggcagtatttaacgtattacctttatctttaacaccatttacacctgctacattttgcgcttgttcaacttgatgcttcaagttgtctttttgtaattgtgttaagttaggtaaaccatcaatcgtatttgttgctgaagttttcgcatttcttaagttgtcagcaccatttaaagccgctttcgctcttgtaactgcatttaatgcattatcaacgtctgctttagatgtgttaccaccagtttgtttatttaaaatgccttcagccgctgtgacagcttgcgtatatgcatttcgttttgattcatccgcatcaagataattttgatttcttaatgtcgcatctttatcattgattgaaccttgtaagctattcattgcgccgtctaatgtattggcatttgtttttacagtattaacgccatcaacagtcgtcgcttgattgatttggccttctaagtcagtacgttgtgcattcgtaatatggtttaaagtgcctaagttttgtttagctgccgctttcgcttctgccagttttgcatcaccattcaatgcatctttcgtacttgttacttgttgtaatgcacggtcaactgctgctttatctgaatttgaacctgtttgtttatttaaaattgctttcgcagcagctacagcttgatcataagcagttttcttactttgttcagcgtcacgatatttttgagtttgttttgttgcattttcatcatcaataccatgttgtaattgacccatagctgtattaagttcatttgcagtttgttggatacttgttacatttgcaacacgttgcgcacttgtaacttgtgcttttaacgcatctttttgcgctttatttaagttagtagcaccatcgatggcatttgttgctgtttgtttcgcttgcgttaaattatgtgtaccatctaatgcatttttcgttgatgtcacttgtgtagcgatttggttaattgcattagcatccatatttggattgcttgttgcattaatgacaccattagcactatcaacagcattgttatagtttgttttgttacgttctgtagcatcaagatagttttggccatttttcgtagctgtgttatcttgtatgctatttcttaacgtacccatagcaccatttaatgtgttggcacttgatttaacagtatctacacctgcaacattttgtgcttgttgcacttgttgtttcaatttatctttttgagcagttgttaaatgttgaagtccgtttatagtagtgtttgcatttgatttagcttgctctaaattatggttaccatttagggcacctttcgcattagcaacttgtgacaacgcgttttcaacggcagttttgtctaaatttgatccactatttttatttaaaatattttctgcgttcgtaacggcttgagtataagcagttttcttatctgaatcagcatcatgatagttttcacttgctagtgtatttgttttatcattaataccattttgcaagttagccatcgctgtattcaattgtgtactcgtattagatacagcttcaacaccagctacagttgttgcttgatcaattttagttgttaagtcacgtttttgtgcattattaattgacgttaagttatttaatgcatttttagctgcattcttcgcatttgtaacgttttgatcaccattcaatgcatttttagcacttgaaacattttgaatagccgcttcaacatcttgtttagacgtatttgcaccttgcgttttattcagaattgcttcagctctgcttaccgcatttgtatacgcatcacgtttagctttatctgcatcagtaaatttaacactttgtttaactgtgttttgatcatggatagcttgttccaagttacccatttgcgtattcaactcagttgctgcatttttagtagcagttacctcactcacatgacctgcacgatcaatttgtgatgagatggcagatttttggttatttgttaagtgtgataatgtatttaagttttgcttagcagtgttttgtgcatttcttaagttttcagcaccgtttaaaccatttttagcattattcacttgtgttgtagcttgggtaatcgcactagtatccatagtcggattgttagtttgattaatgatacctttcgcatttgacacagcgctattatatgttgattggttattcggacttgcgtctgtatagttttgacttgttttgactgttgtttcgttagcaatactatctcttaagcctttcattgcattgttcaatgcttgtccatttgtttgaacagtttgtacgtcttctaatctattggcttgtcccacttgttcttttaatttagctttttgaggtgtatttaattgtgttaatgcatcaatagcagtattggcgttttgttttgcttcacgtaatctttcgtcaccatttaattcttgtttcgcgctgtttacttgattagctgcagctgttacttctgaaggtgtcgtaacaaccgttggcgtaccgctaataatatgttcagcattggtaactttagttgtgtaagcattttgtttagtgctatcggcattaacatatttactgcttgctaacgtattcgtcttatctgcgatggcatgttttaatgtgcccattgccgtgttcagttcagtcgcattgtgctgtacatcttgtgcattagatacgcgttgagcaccattagcttgtgcttttaatgcatctttttgtttttgatttaaatcagatgcgccattgattgctgtaatcgctgcttgtttcgcattgtttaagttttgcgtaccatttaatgcatgtttcgcattattaacattattaagtgcttgttcgactgctgttttcgctgtattcggtccagtttgtttatttaaaatggtttcggctgctgatacagcttgattgtatgcattacgtttttgctcatcagcatccaagaagttttggctcgctaatgttcctgacttatcgttgatagccgtttgtaagttacccatagcaccatctaaactattcgcattttgtttaacagattcaacaccagctaagtttgtagcttgtgaaatttgatttgttaaatcattacgttgagctgtagtgatatgcgttaaagtacctaaatgttgtttcgctgcgttttgagctgcaattaattttgcatcaccattcaatgcatctttcgcattattaacacgttgtaatgctgcttcaactgcattttgcgcagtgtttggacctgtcgatttatttaaaatcgctttcgctgcagtaatagcattatcatactcttgttgtttatttgtatcagcatcacgatatttctcagatgatttcacttgagattcgttgttaataccattctgtaagctagccatagcttggtctagatgttgcgcattttgttttacagtatcaacaccactcactcttgtcgcactagtaatttgactaatcaaattgttcttttgagcatctgtaatacttgtcaatgtgtttaagtacgttttcgcattttgttttgcagcagctaagttttcatcaccgttaagtgccgttttagaactattcacttgctctgctttttgtgtaatcgtacttggattcatttctggattactattagcattaataatcgtttcagcagcagctactgcgttgttatatgctgtttgcttatcattattagcatctacgtaatcttcacttgctttagtcgcatctttgttggcaatactttgtcttaacgtattcatggcttgatctaatgtattggcatttgattgaaccgtttgaacaccagcgacagtagtaccactattaatttggtttgttaaattcgttttttgtgcagttgttaaatgcgtcatattatttaactgctgttttgctgtttgcttcgcttgatctaataaacgcgtaccatctaagttatttttagcagaattcacttgattcatcgcttcagtaacttgatctttcgttttattttgaccatttgatttatttaaaatatctttcgcagcttgtaccgcatttgtgtatgctgttttcttactaggtgtcgcatcttgatagttttgactattaagcgtcgtttgttcatcattgattgcaccttgcaagttacccatcgctgtatttaaatctgtaccttgttgtttaacagtatttacgccagcaatatttgatgcagcattaattttagatttaacatctgctttttgtgcattatttaaatgtggtaatgcatcaattgctcttgcagcatctgttttagattgtgctaatttttcataaccatttaatgcatttttattagaagtaacagctgaagttgcacgattaacatcatcaacagacatcgttggatttgttgtttgattaatgattgtttcggcacttgaaactgcactgttatatgcattttgtttagctgtatctgcatccgcataatcttctgtacgtttcacttgatctttatctgcaacagcttgtcttaagttacccattgcactattcaagtttgttgcattttgcttaattgtattaactgcatcaatttgatgcgcaccattaatttgcgattgtaagttttgacgttgtgcattatttaaattgtttaaatgacctaatgcagtattcgcttcttgtttcgcagcatttaacttagcttcaccattcaatgcatgttctttacttgtgacatttgataaagcattgttaacatcacttggtgttataactggatgttgtgcattaccattaataatgtcattcgcatggttgtatgcattgttgtaatcatttttcttattagtatctgcgttgacataattatcactttgtacgacttggttatgattagcaacgccacgttttaaacctgtcatagcagtatttaagctttgagtcgtttgtttaatatcatttactgcttgcacgttttgtgcactattcacttgttgtgttaatgcattcttttgtgcttggtttaaatcacttgcatgcgtaatcgcatttgttgcttctgttttcgcacgttgtaagttttgttgaccatctaaagcatctttcgtcgatttaacagatgctgctttttggttcactgtgttaacatccatcgttggattagtcgtttctccaatgacacctttagccgcattaactgcattatcatacgcttgtttattagctggtgttgcgtcagtgtaattttgatctgatttaattgtattattatccgcaacactgtcttttaatttcgtcatcgcagtatttaaagccgtaatgttagacttaattgtttcaagcgcagcatgattttgagcagcattaatttgttgcgtgaaattattttgttgtgcttggtttaagttagatgcaccatgtaatgttgttaacgctggctgtctatctaatgttaaaccttgacgtgctgtatttaattgatccttagcttggtttgcctctgtcactttatcattgatattttggacagttgggttgccattcaacacttgattaatttcagttaacttttgacgcgctgcttgtaatttttggttgtacgcatttaacgaagcggtcgtcatacctgttgtatccgttggttgattaatgctttgttctaattgcgttttcgcagtttgaagcggcgctttatctggtgttaaagcttgacgtgcatgatctaaatcagatttagcttgatttgctgtagacgtatttgtattaatttgttctacagtcggtgaacctgctaatacttgattgatttgttgaatcttattacgtgcagctgttaacttcgcattgtatgcatttatagagtcttgtgtcataccagttgtacttgtttgcgtgtcaatactatgttgtagttgatttttcgcattttctaaaggcgctttatcgactgttaagccattacgtgcttgatcaagtgctgatttagcggcattcgctgctgtcacgttttgacgtattgtcgcaacatctggatgtgaggctaatacacgatcaatttcttgaattttagttctagctgctgaaagtttttcattaaatgctgcaatagatgcgcttgtcataccagtcgtactcgttggctgatcaatatcattttgcaactgagtttttgcagtttgtaatggtgccaagtctggagttaatccagcaattgcttgttttaagctattatatttttcttctacttttgttttttctgcggcaatttgttggtcagtcgcatcaccattgttaataacattttgtgcatttgttgattctgtttgacccgcacgtttagcattttcatatgcttggattgatgattgtgtcataccatcagtagttactgatttattgatttcttcatcaagtttcgtcttagcagtttttaaagcactattatcagctaaaggtactaattgattaattgcttgcgttaatcgctcattgacacgatttacatttgttaacgcagattgcacttcttgtactgttcttattggcttttgaataatagcattagcgctatttttagcacttgttaagtcactttgaagtgcacgaatcgaattattgtaagcagtaatacttgccggcttcttaccagtcgttgtacctgtgcgattcaattgttgcactgcttgctctaaggcatgtgtatctgcagttaaatcatgtttcgcttggtttaatgctgttaatgcgttatcgacacgatgtttttcatctgaaatttgttgtgcagttgcatcgccattgtcaataacacgttgagctgcagttatttcagtttctgcttcacgcttcttcgcattatagttatcaatactttgttgcgtcataccagcagttgatggtacttggttcacagaactttgtaagttatttttagacgttactaattggctattatcttctttattttgaagtaatgctttagcttgatcaatcttagtttgtgctgcacgaactttagttagtgcgtcagaaacttgttgtggtgttgcacgctcattattaatcacttgttgtgcttctgttttcgcagtattgatttgttgttgcgcattatgcattgcattattgtactgcgtaattgtacctggctttttaccttcagtgcttactggatcatctaaatgatttttagctgtgattaactcacgtttatccgcttttgtgaaaatggactcttgtacttcttcagtactaccatcattgtaagttactgtcacaggaatcgtcgttgtgctaccaccagctaaattagtaggcattgctgtgccatttttaatcgttgcagtacgtttattagcaacttgaactgcattgttaatttcagctgctgttacatttgaaccataatctttcacaatttcagttgtgttgacagtatgagctgccggtgcagttaatgtacttggattactacttactgagtgacctgtacctgctttcggagtaattgtgattgatgaatttggttttatagtattggcattgaacgtcactttaccagtttgtgcatctaacgttacatagtcaggcttattcgcaattgtccattgattattttgaccacgaacaacattaattgtcttactatgttctgcaccattacccactttttcagtgtaagcaatatccattgcttgagttggattaattaaatgtcctgatggattattaggcgtgatatcaatatgaccattttgccaaatcttagtagtcgcttggttcggttgtggtgcgacaactgtgaaatcatcactacgttgctcatcactcactgtctctccgcttccttgcgttgcaacaacttgaattgtatcagcagggttgaaagtacctgctgcaacagtaataccattattagttccagcaatacctgctacagttgctgcagatgcttctttcacccatggactcgtattattgcgacgtgtaaatgtcgtcacaacgttaccattacgtttaataactaatttatcagcgtatgtcgttacgttaccggcatgtgtattcactgtttggtttgctccaggtgcaattgtaatcgctcctgccgctgtttcagtcacagttggtttcgctggttgcacatcttttactacaaatttcgctggtaaagatgttgcaaaagtatgtccgttatagatgacgtcatattttgcgttaacgactttagccacattcggtttattcatagctgaccagtttgcgtcatttgtacctgtagtatcacgattccatttatacgtaaatccatctgttggtaaaccagtagcattttgcatatgtgcatatcctgatgcttgcgtaccacttgctaaagtgcctccaaccgttgtcgtataagtagtttgagggaattcaaattgatatacattaacagtaacaggaactcgtttagcagctgaaatacctggatatgtgacatcgacatttaaatgttgcacgcctgcttgttggttatttggttgttgtctatttgcccatgctgcagtgataccatttgtgtttgtatttggatcaaatgtaatgtagttcatcgcatccgttccattagtcaaattttgacctttcacatcacgtgatggcgcctttgcattagcaactggataaactttgactggaacttcaacattacgcgtaccttgaccattaggtaatgttacaaccgcagttttatgagtgttaccgactgtattcttccatgtatctggactatcatgccatgcaaccgttgccccatgtggcgggttttgaataaatctttctacgtgtccgaaatcaaaaccgtcgccacctttaataaatacagcgccttcagtagttgcttgtaattgtggtgtcactgttactgttgcactgtcatttgaatcaacagattcatttcttgttactgtaacaacttgaccatgttcgtcttgcgtcgtatacgtcacattgttcattgaaattgaagattttgctttaattccgccatttggtaacgcgtcacttactgtcacaaccgaactaaaaccgctaccatgagtaatatttgtgacatttaatggtgtattatctgctttaaataattttactgacgagttatttaatacgttattaactttaatttcttggtttgtaagacctgctttatatgtcacagagtttgcgtcaattctaggtgggtcaggtttaactttagataaaatagttaaatcttctgtttgtctattatcatatgtcactctaataagacgagtagatatgcctacaacatctttgttaggaccatatgttccaacaaattggaaattcatatgttgcgcatttgtcgaccaagaattatttactggcttaacatattgtttcgcatcatacatatctgaaacacctgggtataaaacacctctggctgtttcaaagacatgtttcggtacagttcttactactttatatgttgctgttttcgtaatcggcgttgtttcgccatcaattaagatatgtgcagttacagttatatcttcaccaatacgtgtattatctttatttggcgcttgtccacttacccatgtaatagttgcatctgcaatgtcactaccattagataacttaaagtaatctgatgcactagaaccattacctgctgggaagtcttggccttgtacagtgtaatgcgaatgtgcaacgatttctggaatgacatgctttacaggtacagtcactgttgatgttgttccatcttgataagtaacagttactgtgacattggcattatttccagtacgactgacattactaactgttttactagtgatttcattcgcacttgctcttgcataacttctatttggtactgtttcagtaaacgttaacgaattaataattgtcgtttgatcagcttgtgatactgtcgcattattcgaaatattggcaattctcacaggattagcagccgttgatgaagtaccaactcgatatttatcacgcaaaggtttcactgttacattgaacgaagttgtagctgtattgccgcttgtatcagttgctaataaattgattgtcttattagttgctgatgtcacatttggtgccgttgcagaaacatgttgatggttattatcaacagtacctgtaatttgtgatgtatttggtacagttacagattgcacaccaaagttatcattcgctgtaatagtatttgtaaatgtttcacctgagaacacttgatgattagtgtaattacctactgaaattgttggattcactaagtcacttggtacaaaataaatgttaatagcgtcagtagtatttcctgtattttgatttaaatgttcaacatattgttttggaccatatggcgttaagtataactgtgctttataaactgcatcacttgcattatgtgtagaattactttttacaacgtggtcaattgtaaatgcgccagcaccattagctgccggttcgtttacgttaacaacagttgagttactatggtttgcacgagtatttgaatttgtaacaggttgcccaccataaccgtttgaagggttgatgatgtctaacacttgaatcacttgaccattcaacgtaaattgacgttgaccatcagttgtcgcatttgattgtgaataaccagtcgttctaaagttaggtcttccgccagcttctgcttgtgatttttcattaccagtaatgttatttcgcaatccaggcactgtagttgttgcttttaacattgttaaaatatcattcgtcgtaatttgagtacctaatgtagcatcataacgataaattaaagatttatggtcatcagaccatgataaaccaccatctgttggtctgtttgcaatttttgcattcgtccatgtcactgtataatcttgtgggaaattaacccaacgcaagaaattcatattagctaggtttgacgcgaatgatttcgttaatcgacctttattaatatttactgtaatagtacttacattagcaccattaggtgtatttgtaactgaaatatcaccttcggcaagcgtaattacatctctatttgcattaataaatgcttgttttacttttgagatttcatcagtagttaaatcatatgttgatgtacgatatacacgttgatcgccttctggttgtttcacatcgatgattttcaaactaatatagaagtcttcactatctttatgatacgcatttgtagcagttatatggtataactgcgtgcctgcgttcatttgactaacttcttgtgcagttggaatagttctatcagatgtaatatttgtaaatgtgccacttggaataggttgtccattacttaaagtaaaatattgtttaatatcaccaatactaaatgattgtcctttagcaatcgttaccgttgctgttttagcagcattgacagtttggtattcaggtttcacaactggttcgtatgtcatcacatttgtagcatcaagcgttgtcgatgagccatcacggtaatgtaatgtgacattaccattattatcgacagttactggatcagttgatgctaaatatcctcttatattttggtttttattcataaaggcagtaattatgctttgcttttcatcattagatacagcagtcggattgactactacaactttctcagtatttcctaatacaatcggatgagcatcttcactaattttacctacatgaattgaaacatgtttagattgactatcatttgtcgtattattgacattgtctgtcgctgacactttaaatgtaatatcactgttaaatgcctgattcatactcactctacctgtaatagataatgagccattattcttatccgcttttgttaaatttgatgtccaaccattcggcaatgtcgtaatagttgtattttttataccagaatgtctatcagagacacccattgtaaagttgacttcgtcgcctcgatagtatttggcatttattccaacaggattattgattgttggtggaatgtcatctggcaaaatagtaacagcattactcatattagatgcaactactttattataataaactactgctctaatttgtttacctacaggtggtatgaatacaacataatcttgcggtcgtatagtaattgtattatgcaccccatcaggtgtaccagtcgcaagtatcgtataaccagatggtatttgatctgcctcactaccaccattcgtagtttgatttgttggtgcaactaaataaaccaatgccgatggatccaacggtattcccgaaatattaacaggcactttttgtaatgctgtacctcttaattgctcagctgtcgttgtaattgttggtgtatgtggtttaacacgaatttcgaataattgttctttacgtccaaaacgtatcgttccaaagtaatcccctggtaataagttaccaacaagttcaatattgcgttctctggcattattaggtctatttgtcgagttttcaatgtgtaatgtacgcggaatacctgtaatttgccaatctttatctgtaaaattctcattacttgttaaattaatacgtaatggttgaatagatgttacgctaccacctaaattcacggaagcattcccttggttacctgcatatacatagaaaactggatgcccagcttgttttgaaaatggtttttcagcaatattttgagtatcgtcatttttaaagaatttaatattatgttggatttcaggtaataccgttaagttaacaggaactaaagtttcactattaccataagcatcaggatagtcgaaaccaatcattaatcttattgggtttctagttcttgctgcttcttgtaatttttgatcagtaaataattgacttaattgatattcatttaattgttgggctccacccggtctaaaagcattagtatttgcattattcgaataaaatcctaacactttattactcggcgtcttaacataacttaaaggatcatcaacaaaatcatctatatttaggtttgtactttctaatacctttttcgtttgtacatttccttgactcacttctacacgtttagttgtacctatgcgatatgtacgattaaccacttgtcttaaaccattaagacgttgttgatggtcttgcgttgattcgacgtatagttgactgtacataaataattgattgtactctaaagcacgcccacctgctgcatagtacaatttattaacagttggaccttgtgttttaaatgaaattgtataacttgcatcaccttgaccgatgaaagtataaactttaggaacacccggtgattcagcaggtttttgaccattaatatattcaaaattttgtctaccaaaagctttagtagcaggtgtcgctccagcttcactaaaataatcactcgctctagataaatcttctaaagaataaatatggacagttggccagtcatatattacttggccacttctatttcttattttaaagtcatgtgaacgatgaggatcatttactccatattcccacatttgttgaagtggtttatttgcacctgctcctgctccatgactccattgtacatttgttccatctgaattaactgttacaaagtcagttcttcctactggcacttggtctgctggtaatgcaaaccaaaagatcatattttgatgtggagcatgtcctttattaaacttaataacccattggtacccgtctccagtttgtttcgctgtcataagagcaatttcctttgagtcagaggccttcaatgtattccatggtgtagttggtaaattatatggcgcccctttactagaagcattgatatatgtaccaacaggatagcccgaaccatcattagcattttcaacataatatgatgaatttgcattttgatagtctgatactgatctaggctctgcagctcttgactcaaccgaacgcgtttgaattctatttgaacgtcggctagtctgttgacgttgaggcattgtacgaattaaagcaacagcttgttccaattctttgtatgcaagttgcaagtctttattgtttattggatcattactgcctaataacgtattaatcttatcaaaaatgccttttacatagttaaatgtgccagaatctgcattttcacggtcaataaagcgataatcatgataatttgcatcaaaaaacgcttgtaattcatttcggtcatgttgtacgttaccattatcagatgaatctgaagctgttactacatttgcttcatgattttctacatgagccgctctattgtcgtttccatttttattagcagattgactttcgttttgtttatgcttactttgttctttatctggttgtgttgtcgcagccgttgccgaatctttctttgtatttacattttgagatgctggttgttcatcattagtagtagatgattgcgctactttttgatctactaaattagcttgactaatatttggttgctcattttcatgagtagcagataatgattgaccattttgtgaattttgagaattttgtacttgagattctcgattctcagtctgttcattattactttgttgtttctgtttaaccacgcttgctggttgatttgtttcagcagcatgtgcttgtgatgtattgaatcctaaaaataccaatgtcgcaatgacagttgaaaatgtaccaactgtatatttacgaatactaaacttttgaattttatcacgataattcacagctattgttcactccttatcttgttgttatgtctctgttgtgttgtgaatgtatttacttttgattgcttgtgtattgtaatgctcattccattctcatttaaaaatttaaaacgatgacgattcaatacaatttcgcaatctatccaaaaagtattgaaacacattacaactatgtgttgaacaatttatttatgctccagaatataataacacaaaatatattgtaaggtaaattgaatttgtgacaatttataataattataaataaagtagcgtaaaagagtaataaaaaaccaatccctatgttcatttaaaataatgacacataagaatcggtttatatttttgtttaatattgtagcgacttgtatgatttcaatttaattctcaattatcataattgagtatcgttttgtttaggcacaagtaacaaaatgataacgaatgataatattcccatacctgcatttaaccataatgcaatcattgcacctgtataaatgtttgtcatatttgatacgattgcatatactgcaccactcaatgcgacgccaaatgctccacctaatgcagaagccattttatagatacctgcagcaacgcctactttttctaacggtgcatttgcaattgctgtatctgttgatggtgtagcatatatccctagtcctaaaccaaagaataaataacctataatacaacaaatgacatagaatatttctggcaagaaagttaatgaaatgagacattctccgacaataagaactcctgttccaattaacattggtttcttgcatccgagtgtttgaagtaacttttcaccaacacgaatcataattagtaccattactaaataagtgattgataaacttcctgcttgcaatgaagaatatcctaaacctctttgaacaaatgtgttggctactattaatgttcctgcaacaccatttaacaaaaagtttgaagctgttgcacctgtgtaagctttatttttaaataatttaaaatcgattaaaggatttgtagcacgcttttcaagaactataaataaactaaaagatccaattgcaatagctaataaagtaataaaaagaagtgaggttacacctaattctgatcctttagtaattaaaatatttaaactgaggagcataatgactaaaagaaccagacctttaatgtcaaatttatttagagaaatcgatttagatttagtttcaggtgtgcctttaataagaaacagtgcaattaatgaaattataattgataggatgaaaatccaacgccaacctaaaagcgttgcaactgcacctccaaaaaatgaacaaacaccagagccgccccatgagccaattgaccaataacttaaagcgcgttgtctatctttcccaatgtaatatgacttaataatagacaaagttgcaggcataatacatgctgctgaaagtccttgaattaatcttcctataataagtaataaaggaatatttgaaataatgattaataatgaacctaatatatttaagataataccaatgttcgtgagtttaattctgccatatttatcagcaagaccacctgctcctactacaaacattcctgaaaataaagcagttatactaacggcgatattaaccgttccaatatctgtattgaaactatcttcaagtattggtacaacattaaccaatgattgtgcaaatagccaaaacgttattacacttagaacaattcctattaacaacttattattgccttcaaatgcctctcttgacggcttttccatctctatttgcctccctatacttttgaaaaacagacaaattccataacagaaatttgtctgttccatagaataattgaatggtttttgattttaatgtgtaaaactttaaatttattagtagtccatccatttattctcaatgctagttatcttaccttatgctgctttttgtttctttttatagtaataaactggtataccaagtgctgttattagaattccaatgattgctaatataaattgtgtaaacagtgtattaattaatacaaatgatcctgccaaaatagcaattaaaggtatgatcggatataacggtactttatatggtcgttccatatttggttcacgttttcttaaaattattaccgcaacaaatgacatacaatagaacaaccaaataacaaagattaacatatttgtaattgtatcaaatgctcccattgacatcatgatgatagcgattataagttgtataattgcgccaaaccatggtgcgccagattttgttaattttgcgaataaatggctaaatggcaataattttctttcagccattgcatatggtacgcgcataccagtcatagtatagccattgatcgtaccataaacagaaattaatataccgattgtaataatcttaccgccattttcaccaaataatatttttgatgtatctgaagctgcatttaaattaccagcaagtagttctattggcaacgttaataagaatgtagcgttaattaataaatacacagccataatacaaccgataccaactgaaatcgctaaaggtaaatcgcgtttaggatttttaagttcccccgcaacatttcctacatgaatccaaccatcatatgcaaacatagttgctaataaaccactaccaattgctgtaaagaagccatttcctgaattacctgtagttggaattaatgaaaaagtgatatctccagattgaaaaataccaaaaattacaataacgatgattggaatcagtttaattactaaagtaactgattgtaaaattccgcctgcttttgaacctaggaaatttatcaacacaatagataacgcagatgcgattgctattggtattaacgaacctatagataaatggaataaattaattagctgtgtcgcaaatacgatagacaatgctgctacgttagctggaaaataaataaatgattgcgcccaacctgataggaagccccagaaatcaccgtatgtatattctatatacttcgttaagccacctgtttcagggattgcagcagcaagttctgctgctgttaaccccgcacaaatggtaatgatgccgcctaggaaccatacaaacaaggccattcctgctgttcctgttacttctgttacgtttgatattttaaagaatactcctgaaccaataactgtccccataacaatagcaaacgctgagaagaaacctatatttttttgtaattctttaccatttgacataattacacctcatttttaagattaaatgttttaacctaccacacccttgcttgtatctgcaatattcagtccatgttcaatgacacctgaaactctagttaagtcaacattcccgcctgaaactaatgcaacaacatttttatcttcaagccatttattgtttatttttccacttaaaattgcagctgttggtaatgcgcctgcaccttcagtaataattttggcacgctgcattaaatctttcatagcatgttcaatttcttcttcagtaacaagaataaattcatctactaaatgtttaactacttcatatgtttgttcaccaggaacttttacatcacaaccatctgctattgtgctatccactcgatgttcagttaaatctctcttatagaaagactcagccataccatgaacattctcagattgaacaccgataatatgaattgaagggttaaatgattttaatgcggtggcaatacctgcaattaatcctccaccgccaactggtacgatgactgtattcacattccaaatatcatctaaaatttctaaaccaattgttccttggcctgccattacaaacttatcgtcatatggatgaacgattgtcatgccattttctttcgctaattcttccatataaagtctagtttcgttaaagtttttaccttttaaaataacctttgccccatagccttttgttgcttgttgtttcgcttgtggtgctgtttcaggcattacaatcgttgcatcaatgcctaataatttagctgttaaagcaacaccttgtgcatggttcccagcagatgctgcgataatgcctttttctttttgttcatctgttaagtgattaattttattgctagcgcctctaaatttaaaagatcctgtgaattgcatattttctaattttagaaatacattccctttagttatactttggcttaaatacattgatttaattagaggtgttcgacgaataaatggtttaatgcttgctttagcttcttcgatatctcctaaacttacaatatgtgctgtttgtaatgtaactgtgttggttgtcataataattacatccttccgttttgtaaatttttagtccaaactataatgctatatttaaaatattcatttcactcaatttcatttaaattactatctattcgataacatttaatatttctttataatctaggtcatgtgatgaagctaatccttgatttgtcacttgtccttggtaaatgtttacaccagtacttaaggcttcattatctttaattgcttgttctaagcctttgtcacaaatttctaatatataatcaatatttccttgtgctaatgccattgttgaagttcttgggactgctcctggttgatttggtacaccataatgaatcacaccttcttcttcatacactggatcagaaattgtagttggtctaattgtttcaatagttccaccttggtcaatagctatatcgattaatactgaaccttttttcattgatttaaccatctcacgagtaaccaattttggcggtttcgcacctggaattaaaattgtagaaataaatacatctgctttcttaatttgttctgctaaattttctggtgttgatttgactactgtgacatctttttctgcatacatatcttcaagatatttaatgcggtcatcgtttaactcgataatgattactttagcatttagtcccaaggcaacatttgctgcatttgttgctgctactccaccaccgaaaatcacatatgtactaccaggtatatccacattttcatgtacaccagtcactaaagtaccttgaccaccatgttgtgcttcagagtagtaagctcccataattgctgagcgttgacctgctatagcactcattggcgctaataattctgcttttccattttttataatggtttcaccactaatcgcagttacaccaacttcttgcattttttctactatttcttttgaagatgctagatgtaaaaatccccagataatttgattctttttgaaatattgatattcgctttcatgaggttcttttactttgataacaagatcagcttcccatgcttgttcgtgagttacgatcttagcgccttctttttcatacatatcgttagaaaatcctgaaccaatgccagcatttttttcaacaattactttatgtcctgcatccgttaacttacgcacattttcgggtgtgcaagctacacgtccttcaccttgttttaattctttgactactgcaactaacatttgcaacactcctctttcatttgtgaataatttcacaattattttatcctttggttatgaatatgtaaataccattaattaattattcatattttatctataatttgttaataaatatttaatatattattcttattcttaaatattatgtgcaattataccactatatttatttcttatactccatttgatttatagttgtattaatacattgactcaaaaactaattaatcaaatatgttttttagattaataaagttgtaactgtactattttgtagtgtatggtaatttatttggatgaaatataattctttatactctattgattaatcaaatatgtatctatcaaaattcggcttatttattcactctgacatatccaaatacgcaaaaagactatttctaccttgtatcgatagaaatagtctttttatacttaattggtttaatttttcataaaatcttatactttttaaaaatgggatgaaatatattttcctgaaacatgtaattcatgttcgttacaaattgataaaatatgattaagcgttgttgcaaatgacattttctcaaaaagcgcttcactatcaattggtacttgtgtgtgaatttcagccagtcgcttcgataaatatagttcatctaaattgtcattaatcttattacgttgcccagctgataatgcatcaatgttttcaaccacattttcaacgctttgatattgctgaattaacttaatagccgttttctcgccaatacctttaacacccgcatatccatctgctgtatcacccataaacgctttaatatcgattagttgttgtggttcaagggcatattcttcgttaaaacgatgtaatgtatatctattataaatgttaaaaccttttttaattagccaaacttcaacattgtcattaatacattgcagtaaatctttgtcgcccgtaataatatagacatcgttatcagttgaatattgttgtgctaatgtacctataacatcatccgcttcatagtttttaacgccaatatttacaaagccaaattgctctgaaatttctttaacataatcaaattgtggtatcaattcttctggtggtgcagaacgattttgcttataaccatcaaacatatcatttctaaaagttgattgtcccatatcccaacatacagctacatgtgtagggcgtatttcatgtattgccgaaaagatatgacgcacaaatccttgtattccatttgtaggttcaccttgtgaattgtacataaattgtttatgaagacttgtagcatagaaatgtctaaataatagcgccataccatctacaagtaatattttattaggcatttaaaacgttccttctttcttaatataaaatagttttcagttgttgatgtttatctttcaattgattgataagtgttgtatctaaatcaaatgctaataaatcgtttatttgcgtttgaatattagcttcaaaactttcaaattgcgattcagcttctacagccatttgctttacatataattcaagctgttgcctcaataatcccatttgtggttgtaataattctaacgtactttgacaaattgattcatgtatatctctttgcccatttggattcaaaattttacgttttgttaattgtttaggcaatgcatttagcatatcgttgaaatcgatgtgcaataatggttgctctatattagctgattcaaagttaaactgaggattaataatgacatgtaaatctgctaattgttgaacgattggtgcaatttgctcagtgagttgcttattaaagtatttttttatacgttctgtaattaaagattgctctaaaaacaatcgttgatgaatttgatctaagtatactctcgtagacactttcttttcttcattaaaatcactattttgcgtcatttgagaattaaacactgatttaacatcgtcaagtagttgtagttttaaacgggcatttaaatgataaacttgttcttcaacttcgttgtctgtatgttgtaacgtcgcatcaattaattgatgttgtaaacgctgtttatctttataatctgttaacctttgttggcgacgtgaaatatcagctttatttgtttcaaattctgtaatcatctctacataagaacgatccatttgttgaagctgatgaatcatttgttgttctaaaattgatttagattcaacatcaacaaattgttgtatgctttgttttaattgatcaatgcccttatcttcagcttgcaatgcatttcgacttgatacagcaaaaatgtctgattgtaagtgtacttgtcttaatgcatctgatacatatgtttcaactgcttcaagatcatcttgactttctgctaaatcagcagcattaattaccatttttaatgcttggttttcattcaactggttcatatctttcatgtgttctataaacgctttgtcattatcagtaaatgaatgattaaaataacttacatacaatattaagtctgaagaagttaaaatttgttcggtttcatttgtatgcctttggttatttgagtgtagccctaatgaatcaacaattattttaccttttaaccaatcatgcattaatgcaatgtgtactgtcttaacaaatgttgcatattcatcttctgcactccactttttcaattcctgttgattaatggcatgtttttctccattttccaacatattgacatacaatttataatgtttttcaactgcctgaataaaagcgagttgatttttatttaaatgtgattttaacttttctaaatctgaattaataaagtcttctatagtcgaataagacatatcttggtattcaactactgcattaatttcatctaataattgcgattgtgattttagcgttatataactctcgtctccataagatatttctgtagtagctgctgtagtaggatttggagaactgactaaaatatgctcgcctaataatgcatttatcaaactacttttaccagcactaaatgttccaaatacacctatttttattaatttattatctatacgtgttaatgtttcgtggatatcttgctttgtacgcttgaacaaaggcacatccgaaattatatcaagcgctttttgaatatctatagacatatttgttgtagctgtattttgatttagctgctgattatcacgattatcctgagcattatcagtagccacttgatatgttgtctcttgtcgacctattaatttatctagagattcatctaaatgaatatagtagtgacgataattcttagtcgtcaatgactgacgcagctcatttaattctgtataacgttgatattcttttaaatcatcactttcttctgttggtaattcatctgcctgcacattttctattatttctttaaaaattggtgttgattgttgttcaacatatttcttaatggctttaaccacttcgtctgaaaatgtaagtacataagtattgctgattgatgtttgtggttgatataaaccttcaatcatttctggcttaacgtcataatgctgatttaatactttatctgaagcttcttttttattgataaaacgcgtaacaaatgacatatcttctcgcattggttgacgaatttgttgattaacatgttcttgtaacgcatctgtcgctgttaataatcgctgttgttgaatttgtagttttttcttctttttattaaaaaatccgccaacattaaagtcttgagacatactttccaaataacttcgtaacatttctctcatattatgcggcataatgtatgcattttctaaaatatttttacgcttattctttaaaaatgccattaattcatctggattatttaaaagttgtgcctcttcactaattgcttgatgttgttgactatttaaaaatgcttgttcaaactccgcttcttcgatacctaaatcttctagtacttcctgaatttcagactgaatgtaatctagctgagcttcggtaatgtattcaaccgttcttgatgtataatcctctattgtctctctatgttgatctaatgaaattagataacttgataatacttcaagttcattttcagggtgatcaaatttagatacataaaaggtgcgttctaatttaataccccaatctgcaattgatttttcaactcgagatttaaacgtagagaatgacaattcatcgtcttgatgcttgtcaatttgattaatgataaacacaacaggtattccaacatcatttatatgcttcataaacttaaagttaagttcagattgaacgtggttatagtcaaccgtataaaatatcatattacttgtatacatatattgttctgttattgactgatgtgatgcaacatttgaatcaacacctggtgtatcttgcaacgtaaacccattttcaaatttagctgattgaaaattaatttctacagattcaacgtcgacattttggcgattcatttcccttacttcatcataattagataatttggcatacgtttgattcggcaaattagcaataatatcgtgattgtctgaaactgacacaatagcagtattacttgtcgttggtacaggtgaacttggtaagatatcttgttcaattaataaatttatcagtgtcgatttacctgcagaaaaatgtccaacgaacgaacatgtatattgctgcaaatatactttcttaattacttggttaattgtatgtaaaagtgcttcatttcgcgacttttcaacttctttttttaatttatataaaagatctaattgttctttattaatcatgttactttcccctttggttcgttcacatagaaatgcttgcttgttacaacgaattcatacaatatcgatgtccatttaaacatagatcgttaaatggctcgcattgtattatgtttaaattttatcatagctgcttgataaaacatacgaataatcaattttcttcaaacattccaacttaaaagttcatttttctaaaaatcacaaatcatcgttaaatttttctagaaaataaatattgtcacagtttgttcacacacatcacagaattgacaccgtataatagccaattgggagggaaatatgaaaaatacatttaatccattacaaagattacatttctatgcagcaatatttattgctccactgttaatcactttaaccatttcgggcattggttacttgttctttccagaagttgaaaataatatttataagaatgagttttttggtgacagtgatgtaaaaacgcatcaaacattaaatgatgcagtacatcaagttgaacaacaatatgaaggattctttgtaagtaaagttagcatacttgatgaaccatataacaaacgaattacactgagtgatatggcaggaaatcaacgttacgtctttctagatcataacaatcaatttgttgcagatcaaaatgcgaaacatacgtattctaatgtgatgcgaagtatacatagttctttgtttactgaaaatactattattaattatttagtagagttaaccgcatgttggatgatattcatgattttatctggtacttatttactcattaagaagcatttaatttctaacaaaagtaaggcacttcgttggcaaaagtggcacgcaatgattggagttatcattgcaattccagtatttgtattagtcttaactggattgccatggtctggttttatgggcagtaaaattgccggtatgatggacacaaacggtgcccttggtcaaggtgaattagcgattaatccacctaaatcagatttgaacgaattaccttgggctacacgtaaaaataaacagccagcttcatccgaaaaaggttcaagtggtcatcatggtaatgcagcaatgcctcaaaccaaattagattatcaaatatctattgataaggtcgttgaacaggcgcaaaaagctggtattaaaaagccgttttcaatcgtatatccaagtgataaaaatggtacctttattgtatctaatactagtaattcaggtgttactgggctagatgtatcaccatacaaggaacaaacactttatttcgatcaatatagcggtaaaaagctaggtacgattaaatatgatgactacggtattattgctaaatggtttacatggggcattccgcttcacgaaggtcatttattcggcattttaaataaaatcattaatttatttgtatgtatcgctttattagtagccattggcatggggtttgtctcttggataaagcgtacaaaaaatactgcaataaaagtaccacatcgcgtaaaaaaaccagcatctatatcactcataatatgtttaattgtattaggattattaatgccattatttggattatcacttatccttgtatttataattgaattaatattatatattaaagatcgtcgtgctaaacaataatgcacttaaagttttgaactgacgaaatttacaaaatgattctcgtctctctaattacttaaaacgggttctataataaatcgtactgatggaaagtttttactttttatctgtccgattttttgaatttgaagataaaaaaacatctaaaacgcataagaagataactctacttcttcaaaattacgttatagatgcttttttattaattcatatgcatgtcgtgaattttcatcattaaaccgtgtgggacgtcatcatgtttaacaatctcttgtttataaaatgtcttcccatcatctttagaaactaattttacaaagtctccttttttcggcttgaaatcattagatggttctactttgatattatgtttgactaatccatctttttcactgacaactttttctgcatttgtattactattcatataaccaaaataagtcgttttttgactagaaaaaatcattaaacatacaacggcaataccaataacaaccaatgcaatagataaacctagacccatttttttacccatttatagactccttcatttttcaaaaatacctattatcatgagaacttaattattactaattttagtcacgcattagaaacactttagttttcaatagttttacgttctgtctttttaccccagtattgataataagtacattctatatatccattaaataacttacgtcgctttgttgctttacgatctactaaatattcaaattctttattacttgttaaaatgtatgtagataaaaatggatgttgtttcattagtttaccaatataacggtacatttcttcaacttcttcacgatcaccaatacgttcaccatatggaggatttccaattaacgccaccggttcttctgtatcaattgttaatgtattgacatcttttacactaaatttaataatatcagacaatccaacttcttcagcgttacgcttagcaatctctaccatttctggatcgatatcagaagcatatacttcgatttctttatcataatcagccatcttatccgcttcatcacggtaatcatcataaatatttgctggcatgatgttccattgctctgatacgaactcgcgattaaaaccaggtgcgatattttgagcaattaaacaagcttctatagctattgttcccgaaccgcaaaatggatcaattaaaggtgtatcacctttccagtttgcaagacggattaaacttgctgccaacgtttctttaattggtgcttcaccttgtgctaatctataaccacgtctgttcaaaccagaacctgatgtgtcgatagtcaataatacattatcttttaaaatggcaacttcaacagggtatttggcacctgattcatttaaccaacctttttcgttatatgcgcgacgtaatcgttcaacaatagctttcttagttatcgcctgacaatctggcacactatgtagtgttgatttaacgcttctaccttgaactgggaagttaccctctttatcaattatagattcccaagggagcgctttggtttgttcgaataattcgtcaaacgttgttgcgttaaaacgtccaacaacaattttgattcggtctgctgtgcgcaaccataaatttgcctttacaattgcacttgcgtctccttcaaaaaatatacgaccattttcaacatttgtttcatagcctaattcttgaatttccctagcaacaacagcttctaatcccatcggacaaactgcaagtaattgaaacatatatgattctccttttatacaggtattttattcttagcttgtgttttttatacatttccaacaaatttaatcgctgatacattaacgcatccgcttactattttaaaacaaggcagtgtcattatatcaagacaaggcgttaattttaagtgttcttttcatgaaaaaagctctccatcatctaggagagctaaactagtagtgatatttctataagccatgttctgttccatcgtactcatcacgtgcactagtcacactggtactcaggtgataaccatctgtctacaccacttcatttcgcgaagtgtgtctcgtttatacgttgaattccgttaaacaagtgctcctaccaaatttggattgctcactcgaggggtttaccgcgttccaccttttatatttctataaaagctacgtcactgtggcactttcaaattactctatccatatcgaaagacttaggatatttcattgccgtcaaattaatgccttgatttattgtttcatcaagcacgaacactacaatcatctcagactgtgtgagcatggactttcctctatataatatagcgattacccaaaatatcacttttaaaattataacatagtcattattagtaagacagttaaacttttgtatttagtaattatttaccaaatacagctttttctaagtttgaaatacgttttaaaatatctacattatttgaagatgtatttgttgttgtattattcgaagaaaaacttttattgtcctgaggtcttgatgttgctacacgtagtcttaattcttctaattcttttttaagtttatgattctcttctgataattttacaacttcattattcatatcggccattttttgataatcagcaataatgtcatctaaaaatgcatctacttcttctcttctatagccacgagccatcgttttttcaaaatctttttcataaatatcttttgctgataatttcaatgaaacatctgacattttttccacctcattagaaactttgatcttcagaccactgtaagtcattgatgaatgctgttaattcatcgaacgtcacaatatcacaagtatagtttgttttatccataaaatcaactaacatctgcttgaagaacttaggactcgcctcttgttcctcatcataaatgagcaatgtttgatccgaatgttcaagcataaattgatctgcttgtttaaattgaaaaggaccttgatacgacgtatgaaaaatactatcaacataatctgcatgcttaattatgttggcatacttactttgattatgttcattccacttttctgtatgtccttggaacggtgtaattacagcaaactttaacgaatcatatgttcgttgtaattcaataacaacttctgcagtccataattctatacccatttgcccttgtattaacacccattctaatccttcatccaacagttgttcaattttatgttttataaattgttttaaataatgtacttcaggtgcgtcatctttaaaaatgtttaattcgaatgatttgtaacctgttacataaactgttttaaccatcagtaccctcttttgttacgccatctaatatattttgtaaatcatattgaacacttttaagcttttctataaataactttcgacttgttcgcttaaaatgacattcgacagaaagttgttcaatgttagcaatcagtagctcaaatttccttgaattcatataaggtacttctataataaattcacgatgtaatttgatctcattgagtatgctatcaatatgttcagtatatggctttacagtttggtaaaaatcatgatcttgttgttgtgatttcacattttcaaaattttgttgcatgttgttaacttcataaattagtgattcgactacatcattcatgaggacgcctcctacattttttaatttatcacaatatactgtattcgtcatgttttaacactctatataatttgatttaactattttttcaaatgtgttatctgttaaatcaagtaaatctaaaaacttcctatataaatacaaaattttatcgtgtatgttgttatacgatgaaaatacttttaatctaataaaatcatttaaatcaaatacacctctgctgattaacaacacatacttgtacttgcctcaaaaataaaaattactaatcatgatttgacttttataacaaaattcaaaaatattgtaatgagtattcatttttataagcaaaacttttcaattaattaaaattgtgtgtaaaattccaacattaacggtaaatgtattataatattattgtgttaatgctgaaatcacgttaaaataagctttggtgtattgtgtctttcgcatttatactaatttaagtttggtgtttcactataatgttgtgtataataaacaacgtttactaccaaacttgtgtggtgaaatttatgaattatccaaatggtaaaccatatcgtaaaaatagtgctatagacggagggaaaaagaccgctgcctttagtaatattgagtatggtggacgtggtatgtcacttgaaaaagatatcgaacattcaaatacgttttatcttaaaagcgacattgcagttattcacaaaaagcctacgccagtacaaatagttaatgtcaactatcctaagcggagtaaagctgtgattaacgaagcttattttcgtacaccttcaacaactgattacaacggcgtttatcaaggttattatattgattttgaagcaaaggaaactaaaaacaagacgtcctttcctttaaataatattcatgaccatcaagtcgaacatatgaaaaatgcatatcaacaaaaaggtattgtgtttttaatgattcgttttaaaacgctagatgaagtttatcttttaccctattcaaaattcgaagtattttggaagagatataaagataatattaaaaagtctataacagttgatgaaatacgaaaaaatggttaccatattccttatcagtatcaaccaagattagactatctaaaagcagttgataagttgatattagatgaaagtgaggaccgcgtatgacggaaaacaaaggatcttctcagcctaagaaaaacggtaataatggtgggaaatccaactcaaaaaagaatagaaatgtgaagagaacgattattaagattattggcttcatgattattgcatttttcgttgttcttttactaggtatcttattgtttgcttattatgcttggaaagcacctgcttttaccgaagctaaattacaagatccgattcctgcaaagatatatgacaagaacggagaacttgttaaaacattagataatggccaaagacatgagcatgtaaatttaaaagacgtgccgaaatcaatgaaagacgcagtacttgcaactgaagacaatcgtttctacgaacatggcgcacttgattataaacgtttattcggtgcaattggtaagaacttgactggtggatttggttctgaaggtgcctcaacattaacacaacaagttgttaaagatgcatttttatcacaacataaatctattggacgtaaagctcaagaagcatacttatcatatcgtttagaacaagagtatagtaaagatgatatcttccaagtatatctaaacaaaatttactattctgatggcgtaacaggtattaaagctgctgctaagtattactttaataaagatttaaaagatttaaacttagcggaagaagcttatttagccggtttacctcaggttccaaacaactataatatttatgatcatccaaaagctgctgaagatcgtaaaaacactgttttatacttaatgcattatcataaacgcattacagataaacagtgggaagatgctaagaaaatcgatttaaaagcgaacttagtaaatcgtactcctgaagaacgtcaaaacattgatacaaatcaagattctgagtataattcatacgttaactttgtaaaatctgaattaatgaataataaagcattcaaagatgaaaatttaggtaatgtattacaaagtggtattaaaatttatacaaacatggataaagatgttcaaaaaacattacaaaatgatgttgataatggtagcttctacaagaataaagaccaacaagttggtgcaacaattcttgatagtaaaactggtggtttagttgctatatctggtggacgtgatttcaaagacgtcgttaacagaaaccaagcaacagatcctcaccctactggttcatctttaaaacctttcttagcgtatggacctgccattgaaaatatgaaatgggcaacaaaccatgcgattcaagatgaatcttcatatcaagttgatggttctacatttagaaactatgatacgaagagtcacggtactgtatctatttatgatgctttacgacaaagtttcaatatcccagctttaaaagcttggcaatcagttaagcaaaatgctggtaatgatgcacctaagaaattcgctgccaaacttggcttaaactacgaaggcgatattggtccatctgaagtacttggtggttctgcttcagaattctcaccaacacaattagcatcagcatttgctgcaatcgctaacggtggtacttataacaacgcgcattcaattcaaaaagtagttactcgtgatggtgaaacaatcgaatacgatcatactagccataaagcgatgagtgattacactgcatacatgttagctgagatgctaaaaggtacatttaaaccatatggttctgcatatggccatggtgtatctggagtaaatatgggtgctaagacaggtactggtacttacggtgctgaaacttattcacaatataatttacctgataatgcagcgaaagacgtgtggattaacggctttacacctcaatacactatgtcagtgtggatgggcttcagtaaagttaaacaatatggtgaaaactcatttgtgggacatagccaacaagaatatccacagttcttatatgaaaatgtgatgtcaaaaatttcatctagagatggcgaagactttaaacgtcctagctcagtaagtggtagtatcccatcaatcaatgtttctggtagtcaagataacaacactacaaatcgtagtacacacggtggtagtgacacatcagcaaacagcagtggtactgcacaatcaaataacaatactagatctcaacaatctagaaacagcggtggattaacaggtatattcaactaatccactcaacataaaatcctcagttataccatatttatggtgtagccgaggatttttttaggttcttcatcttttatggtgggaaggtaaaacttcctgctttttttataagtattcatacgctattgctatattagtagaaaccgtaaaatcagtcattcacatacattttgaaacatctaaatagtttttcatattcacatctttagctatgtaaaattattgaatttgaataagtggttgttcccatttttaaaattatgattatattttctcatagtcatcttagacgctgttttaaattgatatatttattaattccctgtgtacgttaatcagtgaaatatcaacatgtttgcaacatattttcacaatcatagatataagaaatccacctacgattcgaaatagatatcttaaagcatatctcaagatatccattatgatgtagatggacagtttttatattaagacgttgtaatgacacgacacctaacataattataaatatgtgtgcatgaattagttttatatattttcaacattaggaaatgatcaatcttgtctatacctgcttattctttaaccttgtttgataactagcattcattttaatcaattcagttttaaaggtcttcatttgtcgatagcccataaaatgatatttacgttcaatcatataatcatatctttctttaaaattcattggcacaacaggatattgatttaatttatcaaaatcaatattgccagttatgtcattaacctgcttaaaataatcaataattttactatggtattcatccaagtagggctttgcttcactagaacctaatgtcttatttttggcaaataaatcaatctcttgttctaaattatcaaatacctcttttgtaatatttgtcatgttatcacgcttctttcaaactagctttataacgtttttgtccttctctacaatcttctaatagtggacaaatatcgcatttaggttttcgggctaaacagtggtatcttccaaagaaaatgagttgatgatggctcctattccatctatctctaggtatgacagaacataaacggtcttctacctgtctcacattatctttccaacgattaatacctaagcgtttagaaacacgttctacatgcgtatcaacagctaatgaaggttcatcaaatgctacactcatgactacattagcagttttacgtcctacacctgctaaactttctaattccttatgtgtttgtggtatttctccattaaattgatcaatcaaagattgacaaagtttcttaatattcttagctttgttacgatacagaccgatagaacgaatatcattcataagttcttcatcactgactgccaaataatcttcaggcgttttgtattttttaaacagctcagttgttactctatttactagaacgtctgtacattgcgctgacaataatacagcaatagttaattcgaacggattatcatgttttaattcacattctgcatccggaaacatatttgctataacatcaatcatttctaatgcttttttcttacttaccatcaaggttctccccgtttaaccaatcaaatttaggtaccgttttaactgtgtgcgtcattttcggtttattgaatttttctcttatttttctagaatcgtcaattgttttgacattgtttttcttccaattaagtaaaatacgatctatatatttaaagctaagtttattcaaactattcgcctcgtctaatgccgcttgtataattgcagtatcgtgtttatcaacatcaatccattgatttaacgtttctatttcatatggagataacggccttgcaaatgtatcctctaaaactctaaataattgtttaaatttttctttactatttagctctttcgtttccatactttgttgcttcaatatatgacttaatttttcgaaaaaaggatctagattcatatattcggtaaatctaccttcttcatctttttgaacttgtaattctagcaattcacgttgtatcaaattttgaataaccattgtaatatcacgtggttgcatagttgagcccttctgaagcaattcaattgaaggctgtttatttgatgtttcggaagcataaatcaatttaagcaaaatgactaaatcttgctcatctaaacctaagtcactgtaatggtctaataattctcttcgtatcactacaggtcttgcttttaattgatatttatccatgttcgtgcccccttttaaatttaaccattacttaatagtataaatcattttctttaattttcgactaaaatgcttaatatatttaactagtagcaaacaaattttaaataacagtattttttaacactagattttaacaatgaactttatggataatcagatgaactatttattttccaaatatagttactaaacaaaagtttgttcatgattaatataagccgttatcaatcttcattttccaagaataaatcgcccagctattaatataggctggacgattctttttattatcataatatatattttaagtaacgaccctaaaacttatggatataaacggtttaataatcttgggaatggcgctgtttcacgaacgtgttcaacaccagaaatccatgctactgtacgctctaaacctaaaccaaatccacagtgtggcacactaccataacgacgtaagtctaagtagtaactatatgcttcttcgtctaatccatgttctttaacgcgttgttctaacaattctaagtcatccacacgttcagatccaccaataatttcaccgtatccttcaggtgcaattaagtctgcacataatacagtttcttcattttcaggatttggttgcatatagaaaggcttaattttagttggataattagtaataaacaccggtaaatcataatgattagcaatggctgtttcatgtggcgcaccaaaatcttcgccccattcaatatcatcaaagccttctgcttttaagaattcaattgcatcatcatatgaaattctagggaatggtgtcgcaactttttcaagttttgatgtatcacgctctaaaattttcaactctagtttacaattttctaaaactgattttacaacatgtgttacatattgttcttgaatttctaaactttcagcatgatttgtgaaagccatttctccttcaatcatccagaactcgatcaagtgtctacgtgtttttgatttttcagctctgaaagttggaccaaatgaaaatacttttccgtgtgccattgctgcagcttctaagtataactgaccactttgagataaaaacgcatcttgatcaaagtatttagtatggaataattcacttgtaccttctggcgcacttgctgtcaaaattggtggatcaacctttgtaaatccatctttgttgaaaaattcatacgttgcacgaataacttcatttctaattttcattacagcatgttgttttttagaacgtaaccataaatgacggtgatccattaagaattctgtaccatgatttttaggtgtaatcggatagtcatgcgcttctgaaataacttcaattgatttcacttgcatttcgtatcctaagtcagaacgattatcttctgtaattgtgcctgtaacgtatagagatgattcttgagtaatttctttcgcaagtttgaatacctcttcatcaacttctgatttaactactacgccttgcataaagcctgttccatcacgtaattgtaaaaaggcgattttaccacttgaacgtttatttgttaaccaagcaccaattgtaacgtcttggtttaaatgatctttcgcttgtttaatcgttgttttcataaccattctcctatttattttttcgttatacaatactcattcattttaacaaaatccgctttcaagttctagaactagactaaaagataacgtgtaaatggtaatgatttacgcacagatttgaacattaatttatattaagacaatacaatcatcagtttcagacaaaatatataataaagcctcaatattattagtatgaaggtcgttttttgtgctaacattcaagtttaattataaaactcaaattttgacgaccaaacaaaaattcttgtaacagaacatagcacatgtcatgtcacaagaattttactttgtatttcactttttctttttttgaatttgtcttaataattttccaaactgttgaatgtcgccttttttctgacgataattttcaagtgtttgttcaaaaaagtttttataattactgtttatgagtcgatcatcaaatgaaactattatgccgcgatcattttcatttctaattaatcttccaagtccttgtctaaaacgtgtaactgcatcaggtaatacatattccttgaaagttgaagtgaattcagaatccataagccaatattttgcattatgcttgttcataaacggtaacttcgctatcatcacacatttaataccatttgcttgaaaatcaaaaccttcaaaaaatgttgacgtaccaagcagtatggccttatcaaaattattaaactgttgtactattttataattttggttctgctgttgtgttaatacaacataatcttcaaattctggcaattcatttagcatatcttgtaccatatgcatcattttataactcgtaaataagactaaacattttgatgacgttatagtcgtatattcaataatatagcttacaatcgatgctacatactcatctatatttttatattgataagatgctacatcactcggtataaatacacttgtattttttgcactttgtaacgacgtgttaacttcaaatgtattaaagtgaacatctttgttgaataactgtttaaaagcttcaaacgaatgattaaattttaaagtaccagatataaaaatgagcgatttaaatttttccaatacttgtttcgttaatacatcttttacagcgtaatctttcacatataaacgtattgttgatttttgagataaatttttaatcgaaatgaaactagtatgtccagcttttaaactttgttcgatatttttaaatttatcttttaaatacaacaactgtttccgtaatgatttaactgttttatgactaatgccattgaatatttctagcgttttatttaacttatcgataatcgcatgtaaatccttcaaaatgtcttttgtttcaaaagtaaatacattatggaagcgatgaatatcatcatcataaacatcagaatcattgataatcgtaaatatcgttgagaacaattgctcatttaactcatgaatctcattcatactagccttcaagccaaaaatatcaattggtgcaatatctaatttttccaaaattcgctgcttttccagttgatcaattgcctttaacaatttttcattttcgtttttaccaatcaaaccaagctgatatttaatatcagcataactcaactcatttgtcacttgatttaaggcatagtctggtaagcgatgtgcttcatccactatacaatcatcaaacaattgatatattgaattttcaacatcagaatgaattaaatgtgcatgatttgtaataccaatttgaatgttctgtgcatttcgcttaataaaattataataatgaacatcgtgacgtgccggtacatatgtttcaattttctggtcaaaatacatcttttgaccaccttttaaatttaattcctgtatatctccggacggcgtctctgtaatccaaatcagcaattgcattttcaagatattcacttcgtaattacttgtgtcatcttttaaaatttgactaataagccccaatgaaatgtaatcacttttacttttaatcaatagtgcattaattttaaaattcaacgcttcattcattgctggaatatctttttctaacaattgactttgcagtaatttagtattggtagaaatcatgacatgcttcccagtttcaatattatacatcaaggccgcaagtaaatatgctaatgatttaccactgcctagtgatgcttcaatcattgctttttcactatgcatgagctgatctaatatagtttccgctaaatataattgttgcggtcgatatgttaagccaagttgatctacagctttgctatataaagacttcaagctgccattataatttgttgtcggctttttaaaatcaacttgcttacgatagataatctgttcgaacttttcgtacgatttatccaatggctttgcatcatattgcctaaccatctcaaagaaaatatcatacaaatcgtatttcaactgtttacttaaataatataattgcttcaaagtatctaacggtaacttttcaaatttttcaaaagctaatatcatcaatttagcagtagtagcggcatcttcgtcagctcgatgggcatttgctaaggtaataccatgtgcctctgctaattcacttaattgatagcttttatctgtaggaaaagctattttaaagatttctagtgtatctataacttttttgggacgatattgaatattacaatctttaaatgcctttttaataaaattcaaatcaaaatctacattatgagctacaaaaatgcaatcttttatcttatcgtagatttcttgtgcaacttgattaaaatatggcgcttgttgtagcatattttcttcaatggatgttaacgcttgaatgaacggcggaatctctaaatttgttctaatcatagaatgatatgtatcaataatttggttattgcgcacaaacgttataccaatttgaatgatatcgtcaaaatctaattggttgcctgttgtttccaaatccacaacggcataggttgccatacccatagctatctctccttgctttagtgttaaaaatctatatctgcactaattaaacggtgtgattcacccgcttcatctctaacaattagatagccatcgtaatctaaatcaattgcttgtcctttaaactgtttatcattttctgtaaatagcaacgttctattccaaatattagaagctgcagtatattcttcacgaatttcagaaaaaggtaacgttaaaaattgattatatcttttttcaatttcttgaagtaatatctctaaaaattgatatctatctaatttatttttatcatgtaattgtatacttgttgctctatgtctaatactttcatcaaagttttctagttgttgcgtcaaattaatacctataccacatattattgcttctataccatcattattagcaaccatttcagttaagaaaccacacactttaccattatcaatatatatatcattcggccatttcactttgacttcatcttgactaaaatgttgaatcgcatctcttatccctaatgcaataaataaattaaatttagatatcattgagaatgcaacgttaggtcttaacacgacagacatccaaagtccttgcccttttgaagaactccaatgtctattaaatcgcccacgacctttcgtttgttcatcactcaagataaaaaatgaagattgatttccaacaagtgactttttcgcagcaagttgtgtagaatctattgaatcgtatacttcactaaaatcaaacaaagcagaactttttgtatattggtctattataccttgataccaaatatctgggagctgttgtaataaatgccctttatgatttactgaatctattttacatccctctaactttaattggtcaatcactttttttactgcagtgcgtgaaatattaagtgattccgcaatgctttgtccagatatataattcggtttatttttatagagtaattgaagtacatcttgactatattttgacatgattatccacccatttcaaaatttcagtttcttcgttgcttactttacctgttacaatcgctatctcaatttgtcttagcacatcttttaaccacggaccacttttggcatttaaatgtgccataagtacaccgccattaaccatcatgtcttttctattatgcataggtaaacgatgtaatgtttcatcaatcgtttgaaggttaacgattaatggttcatgtccttgaatatcatttgcctttaacacgtctgctgcaaccattacatttttaatgagatgcgtatcataatcataaacaaacatttttaattgttcttttgtaataatacttggtaatgcattcataatttgaatatattgattgatatcttttacttgtcggttacttagctttaaaggcttcaatgagtaattaatatcaaatttaactgatactatagcaatcaacaattctaaatcaattgcttcagttacattaatttgattcatatcaagatgttcgaaatacggcatataattaaatgctttcagcgattttaaatgattaaaactcttttcaacattaatacctcgcattaatttagttagttcaatcactatacgctcaattgataaaaatttaatatctgccatttgtatacgcatcgcttcgaatgtttccgttgcaatatcaaatgataattgtgactggaaccttaaacatcgaatcatacgtaaagcatcttcttggaatcgttcctcagctatacctacagttcttattattcgattattaatatcttgttgaccatcaaaataatcatacaatttgtatgctgtatccattgctatcgcattcatcgtgaaatctcgtcgttgcaaatcttcgtataaatcacgaacaaatgtaacaccacttggtctacggtgatcgacataatcttcttcagcccggaatgttgtcacttcataattttcatcattaaaaactacatttatcgtgccatgttctttacctacaggtatcgtatgactaaagatagattctatttcatccggcgttgcacttgttgtgatatctatatcatgaatatttcttcccatgacataatctcttacagagccacctacataatatgcttcaaaaccattgtcttgaatttgttctaatataggccttgcctgttcaaataatgatttatccatattattactcgcctttacttttgttatgctcatttagcattttttgataataatactcatattgatctgtaataagttctgatccaaaacgttcagcaatatctgctagcatgtttttctgaagtttgttgtataacaccttatcttcaagtaatcggatagcatagtcactcgctgaatcacaatcacccacatctacgacaaatccagtttcaccatgtttaataacctctttaattccaccggcatttgaaccaattggaacgacgcctgttttcatagcctcaagtaaagttagtccaaagctttctttttcacttaataataatactaagtcagataattggtaaaattcacttacgcaatcttgtttccctaaaaataaaacatcctcttctacgtttaactctttcgtcaattgacgcattggcactaattcaggaccatctccaagtaaaattaatttactaggtatcttttcacgtacttttgcaaatgtttctataatagtatctatgcgttttacttgtctaaaattcgatacatgtattaacactttttcatctggtgctataccaaattgtgattttaatgctgtgttatgtttagttggaaactcattttcacgtacaaaattataaatcggtataatttctttgttagtttcaataatttcatgtgtttcttgtgctaaagatttactcacacttgtcacaatatcacttttttcaatgccaaatttaattgcaccttggagtgaatgatcatagcccaaaacagtaatatcagtaccgtgtagcgttgtcataatttttatatctttacctgacatctcacgagctaaaatcccacaaattgcatgaggtacagcatagtgcatatgcaacaaatcaagatcatattctttaataacttcagcgattttagtacttaacgtaatatcatacggtggatactgaaatactgcatattgattcacttcaacttgatgaaaaatcatattcggtaatggttttcttattctaaacgggatatttgaagtgataaaatgtacttcgtgacctcgctctgctaatttaattcctaattctgtggcaataattccagaaccacccatggacgggtaacatgttatacctatcttcattcgcttgcccatcctttctttctatttctctctattattctcgatgcgtagataattgtttaaatttaagtttatagtaatgttgagtttataatttcatatatctaaaaacaggtgttgtatatataatcattcatctagttatacttactttaaaaataatataatttcatgcgatgcaattcattgatggatgtttttaatcttaatcaaatccaaataaagcatatatttttaaattcactttctttcgaatcgatttttatctcttgtattaaacttttccattgtttcattaaagctctctgtcatatctattcccattgaattcgctaaacataacaacacaaataaattatcacctaattctgctttaatcgtatttgcttcctctgaatctttcttctttttttcaccataggtatgatttatttcacgtgcaagttcgcccacttcttcagtcaatctagctaagttagctaatggtgaaaaatatcctgttttaaattgtccaatatattcatcaacttcacgttgcatttctaccattgatttcatttctacgttctccttatattgcatttctaatatagtatatatcaatttgaagtctcatgcatgtttagtgcaatctactgactctagctaaactagatgacaagttgtttattttagaagtttaataattcagtttatataaatgtaatgcattcctaactaaattaaatcaattgaaattgggattataactttatgatacgtaccactacaataaaataatatagtgaataatctaccattagaaaaataagcacaaaaaaactagcaaccacacaaaaatgtgattagctagttaataagtgtctaatttaagttaattgttaatctataagattaatcacttgaacgcgcaatcaaaataatacgtacaagctctgctacagcgactgcagttgctgcaacataagtcattgctgctgcagataatactttacgcgcatgcttgtattctttttcatttacaatgttcaatgccgtaatttgtttcatcgctcttgaactcgcatcaaactcaactggtaacgtaacaattgagaataataccgctaatgacattaaaccagcaccaatccataaagcagttgaaccaaatgcactacctatcgctgttaagataatacctaacatgatgatcatataacttaatgaactccctaggtttgcaacaggtactaatgctgctctgaatcttaagaaccaatatccttggtgatcttgaatggcatgaccaacttcgtgggctgcaattgcagttccagcaactgatggtctgtcatagtttgcaggagatagtgaaacaactttctttttaggatcgtaatgatctgttaagaatccttcacctttaacaacttcgacatcataaataccgtttgcatgtaaaatttctaatgcaacttcacgacccgttttaccactagttgatctaacttgtgaatatttctcatagttagatttaactttgtgttgtgcccataaaggaagcaccattaatattacgaaataaattatcatagtaaaaattgaagacaataaactcactctcctttataaatattttactgtcatttgccgtttttatcaaatcatttacactttaataatttgtttaattcaatataaagcaaaagtccaaaaacacttagacaacatgataatacaccaatttgccacacatgtgtagttataaaatcataatatggaaattgaaggtgaaaatagtcaatataatcattcaaaaacacccaaatcatcgctacactgattccaatcatagaacgtttaaacctaggatagaagtaaattgcctgaacagccattatactgtgggaaaacattaataccaaaccatttactgtaatatcaccttgttcaataataaataatatattcattataactgcccaaatcccatatttgaataatgttacaaatgccagtgcatcgataatactattttgtttttgaattaatatcaatgagatagaaataactaagtataatattgcagttgggctatctggaacaaaaatcttaaaatgccagggcgtatgacttaattgttcaccataccatatataaccataaatcatccctaatatattacaaatgagtagcatcattaaccaagaacgttgataaagtgtatattgccaaaatgctttaattgtcatctgctaagtcctcaaattgattatgtttatttactagcttgagtgtatttaaaatttgcgttagttgataaaaacgttgcttttcattcatctgtaaacttaaatcaatattgtgtaacaagtaatctattaataacgcatgtttatgccgatctatagccatactatttaagtcatgaagataagtttgataactgggcgattccgttagttgagcaactattaaatcatctagcctttgctcacgctttgacacgtttgcgaagtgaatttgaatatcaaaagcacagttatgattagcgatataatcaaatatttcatttgtattcattaactttatattacgcttagtaaattgaattgcagaagcgtgacttcccacttctgcaatttctaatgtttcatgatgattaatttttgtatctacaaaatgaatgtttgccaatttcgcctcattcacttttatatagttaagcacccaaactgcaatacgcgacttaaatcgatattgaaaaagtaaatattcaataaaactttctttaatttgattgaatgtctctgacatcaaataccccattttaagattgcaatcttgataattcgtcatgccaattttcgttacttggctctagttccaacaattgatttaaaatagtaattgcttgttccttttgaccaatttcaattaaatagaaataataatcactcataaaatcaatatttgttttcatcgttggatatgctaattcaaagaaatgttgagcttctttatctcgctcttcttgaccataggcgaacgctaaatgccacatgaatgtaggatccaaatcttcttcatctacatatgttaataattcaatgattgcttcataatcttcttcattacgatataaatcgcttaaaatcaataaaggttcttggtaagcattatcaacctctaatgcttgttttaacaataatacaccttcattagcatcgccgtgttctatttccaaacatccagttgtatacattaactctttataaaattgacttagtcgtaatccttctttacccgtttcaatggcatctggataatttttttcattttcatataatgattgtaaatacaagtagccttgaatataatcaggatctttagaaagtaatgtagtcattattttaattgcttcttgagtgatgtcatttttatcgtaagaaatggcttttttgagataatcttctgaagtcatttcatcttcattaatttcatcgtataagcgaatcgcatcactatagttaccactttgtaaactacaatctgccatacgagagaataagtttacaccattaacttgatattcaccagtttctaaaacggtttcgtattcagaggtagcacgtaaatattgaccatcataatataacatttcagccaatgcaaaatggattattggatcatttggctctagttcaagtgcttcttgtaatttatcaatagcaacttccatcatattaatttgttgatataaatctgcttctaacatcaacttttcaggtgatggttcaacataacttaaatattctaacgcttcgtcagtttgattttcagacattaaaccttcaataaaataaatcagcaattcactttcgtctggatatttgtgatataacacgcggaatacttccaaaccttgtggcattaatccaaaattgtaaagtgtctctcctagaataaataatgcgtcatcgttgtcagtagttattgcttcattaacacgagagtctaaattttctagtttttgtagattgatatcgtctattaatttatagatatcttccattttatattatccctcattttctaaaagctttagttttggtaaaaatcctggaaatgatacatttacagcatcaaattgtttgattttgacaggctcgcttgaaagtagagaagcaactgcaagcatcattcctattcgatgatcagttaaactatcaactgttgcatttgttttaaattctgacggatgaataatcaatccatcattagttggttgtaattcaaaccctaacaagtttaacatatcagccgttgtatcaattctatttgtttcttttacttttaattcctcggcatctttaattgtactcgtgccaactgcttgtgtacaaagtaatgctattacaggcagttcatcaattgcttttggaactaattctccttcgattgttattggttgaagcattggtgtgtattgaatacgaatagaagcagtaggttcagcaccagttgtttgattgaaaagttggatattaccgcccattttttcaacaatatcaataatacctgaacgtgttggattgattccaacattatgaattgttacatcacttcctggtgtgataagtgctgcaacaataaagaacgctgcagatgaaatatcgccaggaacatgaaaatctgcaggtttaatgtatcgaattgcttcaggggttgtattaattgataacccttctgcttcaattggaatattaaaatgtttgaacatcgtctcagtatgatttcgacttacatctaattctttaatgatggtcggttccttagaaaacaaacttgcaaataaaatggcactttttacttgtgcacttgcaacttccatttgataatttataccttttatgacagatggcttaataattaatggtgtataattatcttcaataccttcaatattcgcatccataagtttcaatggtctcaagacacgatccattggccttttaccaattgaaacatcgccagacaaaacactttcaatacctaaaccacttaacaaacctgccaataatcgtgttgtcgtaccagaattacctgtatacaatacttgatgtggcgtgttaaaagattgatatcctggggaagtcacaactaatttttcatcatcttctttgatttctacacctaacagtcggaaaatgtccatcgtacgacgacaatcttcgccaagtagtggcttatatatagtagatacaccttcagctagcgacgccaacatgattgcacggtgtgtcattgacttatcgcccggcacttctatttcgccctttaacggacctgaaatatcaatgatttgttcatttaccatttcattcacctacttaaaatatgtttttaattgttcacatgcatgttgtaatgttagttgatcaacatgttgtacaacgatatctccaaattgtctaatcaagaccatttgtacaccttgcttatcattctttttatcacttagcatatattggtataacgtttcaaaatccaagtcagttatcatgtctaaaggatagccgagttgtattaaatattgaatataatgattaatatcatgcttagaatcaaacaaagcattcgcaactataaattgatagataatgccaaccatcactgcatgaccatgaggtattttatgatagtattcaacagcatgaccaaatgtatgacctaaatttaaaaatttacgtacaccttgttctttttcatctgcaataacaatatccagcttcgtttcaatacctttagcaatatatttatccataccatttaatgactgtaatatctctctatctttaaagtgctgttcgatatcttgcgtcgctgattcaccattcaataacgcatgcttataaacttctgcatagccacttaatatttgctcaaatggtaacgtctttaaaaagtctaaatcataaatcacagcagttggacgataaaatgcaccgataaggtttttaccttgctttgagttaatacccactttaccgccaacactagaatcatgcgctagtatagtcgttggcacttgtataaagtgaacgcctcgtaaaagtgtcgccgcaataaacccagcaaaatcaccagttgcaccaccaccaacagcaataattgctgtattacgagttacatgatgggataaaatatactctaatgtttcttgatattgctcaaatgttttcgtcttttcaccagctggaataataactttatgtacattttcatatgataaaatatcatcaaatttatcagcaaaatattgatttacatgctcgtcaattaatataaaactttgatcaaactgatcaatatacgtgctaatatggtcaattgcaccgtgttcaacatatattggataattatttgaagggtatgttgtttgtaatttcatgattacacctcaattgttcttgttgttaaaactcaatatttaattgtctgcgctcaataatttgttgtttaagttgctcaatatgatttgattggaattcttccaataatgcttttgctatttcaaatgctacgacatgttcgcagacgatacttgctgcaggaacagcacaactatcagaacgttcaattgttgctttaaagtcttctttagtattaatgtctactgaatttaatggtttatataacgttggaattggtttcattacaccattaacgataattggcattccatttgacataccgccttctaaaccacctaagtgattagatccacgataataaccaatttcactattatatagaatttcatcttgaatctcactacctggcttttcagctgctttaaatccttcaccaaagcttacacctttaaaagcatttatgctgacaacaccttgtgcaatcttaccatctaacttacgatcataatgcacataactacctacaccaacaggcatattttcaactacaacttgaacgacaccgccaattgaatctccttcatttttagcttcgtcaattttatctcgcattgcttgtgcgatactgtcatcaattacacgaacatcattacgatcaagatttgctttaaatgtttctgaatcataaaaatctttatctttaattccacctatttcaacaacacgactgtatatatcgatatctaactgttgtaataacactttacataaggcaccgactgcaactcgagctgctgtttctctagcagatgatcgctctagcacatttcgtaaatcacgatgattatatttcatacctccaaccaaatctgcatgaccaggtcttggttttgtaatagtacgtttcatattttcacgttcttcttcacttattggagctgctcccataatttttctccaatgcgtaaagtcatcattggttacaaccatagtaattggactacctaatgtataaccatttctaacgcctgatactatttctactgtatctttctcaatttgcatacgacgtccacgtccgtaaccgccttgacgcttaaacatttctttattaatatcctcaaccttaatttctatatttgcaggtacaccttcaacaataactgttaattgaggtccatgtgattctcctgatgttaggtatctcatacacactcgctcctttcatacttccacgataacattataatatgttgttaatcttatcatattcattgtgcattcataaatgtttgttttcaagctcaattaagaaaatggatgacatctcattttaaatgtcagaattatcttaatattaaacgaactaaaattaattataatatattcgtctgtagaaaagtatcatgaatttctaaacagttgcatcatataatcattaattaaaaatgattagccgttttaatataatcgtatcgcaactttagcaaataatatactgactacatttcttaatacaaaagaacgaactgttaattattaataaagttaatcagtccgtttaaaaaaattatgatattaaaatatacatatgttaagcgcttttgttatactttgacttcaaaaatataatcaattcttttactaatacataaaaaatataaatgagagtcagtataaaaataatttttgttataggattaagtggtttatctaaaaatatagcaccatatagtaattccattaattttaagaacattaaaatccccaaaataatcgaaataatattcttcattttaacaaccccttctctctgtttagtttcatttgataaagaatattcctctctttttaatacgtgttaccaaaaaactataaaatttttcaagtaatttactacaacataaaaaacgggccttgttatgtataatcataatgactaaccacataacaaaaccctttctacctttataaataaatcgtaaaggtttacagtttatattttattcatataaccatgcatcacgtggtgaagcatagctagtaatttcattttcattaaaccatagattaatttcacgttcagcagactctaatgaatctgaaccgtgaatgatatttctaccaacagttaaacctaaatcacctctaattgatcctggtgaagcttctgaaggattggtgctgccaataatatgtctagatacattaactgcatcttcaccttcaactaccattgcgaacactggtgctgatgtaataaatgaaattaaatcattataaaatggtttaccttggtgttcaccataatgtgtttcagcaagttccattggtacttgcattaatttaccaccgacaagttttagtccttttctttcaattcttgaaattacttcaccaattagatttctttgtactgcatctggtttaatcattaaaaatgtacgttccactttatgtatccccctgtgtttaataggtttatgtatattactattatatattaacaggttggtaaagcgctttcaatacttttcataaatactacgtgtttcttgaacccatttttttcgtcaaacttaaaagtagtgatttcggatgtccatctggtaactcagaaatcaaattcaaagctttacttaaatacttcgaacttactgccttagcctcatcgatgctgtcagattttctaatgatttggatacattcttcaaattctttgcgttcactatcacgacgtaactgttcgattttcaatttgaagtctggatttttacgcatttctaataaaatcggtaacgtaatatgaccattaagcaaatcacttccgaccggcttacctaatttcttttcggtacttgtgaagtctaatacatcatcaatgatttggaagctcatacctatataatgaccaatcattttcaattttcgtacagtctctttatcagattgagaagtaattgcaccaacttcagttgatatttgaattaacagtgctgttttgcgattgatacgtcgtaaataattaataattgtctgttgactgttaaattggtcttgaaattggaaaagttcccctctacaaacatcaacgatagattcagatatcaattgatgtacacgattatctttaacggccattaagtgttcaagtcctaatgccaataaaaaattcccagttaaaatagcagttgtctgatcccatttctttgatatggttaacttgcctcgacgcttgtcgcttttatcaataacgtcatcatgaacaagtgttgccatatgaattaactctaatgcgactgcaacttgatacgtttgttcagacgtttgttcatctttgccaaattggctactcagaataacaaatgctgggcgtactcttttaccaccagaagacaataagtgtaatgatgcctgttctaatacagaatctttactttttattgccttttcaagtcgttgttccactttcttaatttcattgttcatgtttaactttgccacgttaatcacctttggtattatctttttctttatagccaaggtgcattgcagcaacgccccctgtaaaactacgtactcttacatttatgaaacctgcttcttcaaacatgcgcttcaactcttcttttccaggaaaattaaacgtagattgctgtaaccattcatattcttcttttgattttgcaaataattttccaaaaataggcataacaaatttaaagtatagtgcatacatttgtttaaagactggcaaagttggttggctcgtttcaagacataccaccataccacctggtttaagtactctattcatttcttttaacgcgactaaatagtctggcacatttcttaatccaaacccaattgttacataatcaaaagaattgtcttcaaacggcaattccattgcatcaccatgaacaagtttaacattttccattgaagcagttttttcttttcctacttctaacatattctcactaaagtcaataccagtaacttcacctgttggtcctacagctttgcttaatgcgattgtccaatcaccagtaccacaacaaacatctaatgctttcgtcccttttctaacacccatgtctttcatgacgcgttttctccatactttatgctgctcaaaactaataatattatttaatctatcatatttttttgaaatattttgaaaaacgcgatgtacttgctctttatttgctttattgtcagccatgcttaattacctctactttttaaataacttttttggatatcgtgtaagtaatgctttacttcactttgattatatttcttgaagtatgatggatagtaatcagacatatcttcaaataaataattatatatttccgactcatcaatattgataccgaaatgagataacgtaatatatgggaaaagtgtttcaatttttactattgcttgagaaatttcataatcatttaaagcttgatgatgtaatgaagatttcaattcattaatttcaacaattgctttactaatttcattttgaaatgataaatcattgatttctgctagtagcgtataaaaatgtgcactaattaaatctccaatcaaaatggaatgtttagacaaatgattatatgtaatgtcatcaaggtgtctcattgatgtgtcaattgtgaggcatgccactttggcaacatctggaatatcatataaatcaagtaacttacctaaccgatgattaatattaatggattcatattctgatacgccctttaatctttcttctatttgtctttccaatttgctaacagttgtttccatgtctacacctcacgatattatcactattcatattaacattatatgtaagaaattaaaatcttttgaagcattaagattacttatcatttttaaatttcaatttaaactaacagtaatttatgtagcttttgtaattctcataataacctttacttcatttacattattcatctttttaaataacgtaaaatactatagtagacatggttaccttttaagtaaattcaacgctaacaattaatctcaatattcatatgtatattttgtagttgctatttttatcaaaactattatgtcatgtaatattttgaacgcttaaacaatgaatgttccaaagattaaaaacttagaagaacattacaatttatgtacaggttgtaagtattaaaagcaaaataaaaagcccttattcagggctttttaagtaaaattattttacagcatcttttaatgctttaccagctttgaatgctggaactttacttgctgggatatcaatttctttaccagtttgagggttacgacctttacgtgcagcacgttcacgtacctcaaagttaccgaaaccaattaattgtactttttcacctttagcaagtgagttttggattgattcgaatacagcatctactgctgaaccagcttcttttttagttaaatcagcttgctctgcaactgcattgattaaatctgttttgttcattagacattcacctcctgaggtttgataatgatatgtttatatcattatggtaaaactttaacacaagcattacataaatcgcaatcatttatgtggcaaaaacgttgaatttaagccatttctattcattttacgtaattattagccgtatatgtgtaataatacacattttattcagattttttatcgcgctccattaaatcttttacgcattcttttactgagatattttcaaataatactctatataatgcatttgtaattggcatatccacatttttttctttagctaaatgataaactgatttagttgtataaataccttcaacaaccatattcatttcagataatgcttgatccattgattcaccttgtccaagtttatatcctaatgtgaaattccgagaatgtgttgatgtgcaagtaacgattaagtcaccgataccacctaaacctagaaatgtcataggatcggcacctaacttttcacctaatctactaatttccgctaagccacgagtcattaatgcagcttttgcattatcaccgtagccaattccagctacgataccacttgctactgcgatgatatttttcaatgcaccaccaagttcaacaccaatcaagtcatcattcgtgtacacacgcaaataatcattcataaataaatcttgcgttaatttacttacacttttatcttttgatgaagcagcaactgtagttggttgcttgactacaacttcttccgcatgacttggccctgacaacacgccaatacctgcattatattcaggtgaaatagaatcttcaatcatttctgacacacgtttaaacgtcccattttcaatacctttagcaacatgtataaaagtctttttagaggtcagcttatcattaatttgagaagcaacttctcgcattgctttagtaggtaaagccattaagtaaatatctgcaaattgaattgctttggtcatatctgaagtagcgatgatgttaacatctaatttcgcgtattttaaatactttttatttgtatgacatgtatttaattcatcaacagcatcttgatttttaccccacatcaaaacatcatgtccattttctgcaagaacattggcaagggctgtcccaaaacttcccataccaaaaacggtaattttagtcattgttatcccccaatcgttaatttctctttcgagctataatatgaattggtgtaccttcaaaaccaaaagcggcacggatttgattctctaaatagcgtttataagaaaaatgcattaattctacatcattaacaaatacaacaaatgtcggtggttctatagcaacttgtgttgcataaaagacattcaaacgtctacctttgtctgttggtgtagggttcatggaaattgcaccagtaacaacttcatttaaagttgaactttgaacacgttttttatggttttcacttgcttcattgatgtaagggaataatgtacgtaatcttgtgcgttctttagcagacacaaaagcaatttgtgcataatctaaaaattggaattctttacgtacttcatcttcaaatttcttcatcgttttactatctttttccacagtatcccatttatttacgacaatcacgactgctttaccttgttcatgtgcatatcctgcaacacgtttatcttgttcaatgatgccttgttctgcatctatgaccactaaaacaacatttgaacgttcaatcgcttttaaagctcttaatactgaatatttctcagttgattcatatacttttccttttttacgcataccagcagtatcgattaaaacataatcttgtccatcataactatactctgtatcaatagcgtctctcgttgtccctgcaacattagaaacgataacgcgatcttcacctaaaatagcatttactaaacttgatttacctacgtttggtcgtccaataatggatagtcgaattgtatcttcatcataaggatcttcttcctcttcaccaaaatgagaaacaactgcatctaacaagtcaccaagacctaaaccatgtgaccctgatatcggatacggttcaccaaatcctaatgaatagaaatcatacacgtctgtacgcatttccatattatctactttgttaaccgctaatacgaccggttttttagatttgtataaaatttgagcgaccatttcatcgctttgtgtcaatccttcacgcacgttaaccataaaaataataacatacgcttcatctatggcgatttctgcctgcgctctaatttgtgtttggaatggtgcatcaccaatttcaataccacctgtatcaataatattgaaatcatgtgttaaccattcacctgaagaataaatacgatctcgtgttacacctggcgtgtcttccacaatcgaaacacgttctccaactattctattaaaaattgtagatttacctacattaggcctacctacaatagctactataggtttagtcataagctaacttcctctctttcttatatctttttaataatatcacatgagactgtgtattcaaaatgagtttattactgtaatgataaaaatcagcacttaaaactttatctttttaaacacttagttaaatttgtccacgttatcattccgagtatattttgttacataaaaatactccacatgcaatcataaacatgtggagttgactattaaatattaaattatagtttaagatttttaagtttatcaccaatcatatcgccaattgttggattatcttcttcttcgttttctaagtacgccttagtcgtagaaggatcactttcaacaacatcttcgtttggtaatgttgctttaatagatagtgatactctttcattctcttcatcaatacctaatattttaacatttacttgttgaccaggttctaacacttcacctggcgtaccaatgtgtttgtgtgcaatttcagaaatatgtacaagtccttgtacacctggtgcaatttcaacaaatgcaccaaagtttgccaatcttactacgacaccttcaatgacatcattttcgtggaattgacctttaatattttcgaaaggtgttggtaacgtatctttgattgataatgaaatacgttctgtatctctatcaatagatttaattttaactttaacatcttgaccaattgaaactacttcttctggtgtttgaacatgttcgtgagaaagttcagatacatgcactaaaccatcaacaccgccaatgtctataaatgcaccaaattgagttaaacgcgctactttaccatcaataacatcgccttcatttaaagattgtaataattgatcttttttagcatcgttttcttcttgttcaactgctttacggcttaaaatgactctattattttcaggatccaattcttcaactttaatacgaattgtttgtccatcaaacacagagaaatcctcaatgaagtctgttgaaattagtgaagccggaacaaaacctctttgtcctacatcaacaaccaaaccacctttaactacttctgttactttcgcttcgatgatttcattattatctaatttttcttgtaaataactataagacttctcagtttcaagttgtcttctagataagatgtaagctccagtttcattttcttcatcaaactcaactttagtgacatatgcttcaacttcgtcgccctcttttacaacttcacttgggctatcaatatgatgcgtagataattgactaataggaataatcccattaaatttaccaccgttgatatgaacaacaacttgcttgtcttcaacttgttgtacctcgccagtgactttgtcaccttctttaatatcgttaatcattgattcattgaattcttcagtcatcttgtttgcctccttatacactacatatttataacatcttataaactgacagaattgtcaagaaattctacctcgattacattttgcgaaatagtcatatacataaatatgtcactttatcatattcaagtcgtcatatcgataaatatttattacaaccatttttgtatcaaagtaatacagtttgctatgtttatacatattttttgtataaaaattagcatagcttactattttgttttataagtctgtcatttcattgttctctacaagatatattatagtaaaattttatacttttataaaacaaaaagccacgcaaataagcaacttttacatttgaatagtaagaagaccgtatatagtgcatctttctcgaattattacataggacattttttgtgactaaatcagcttcttttgcaatatttagatttgtaacactcattttcttaccatttgtaaaatgctttatgaatgtaatgaattatttttggaattctaataattcacctttattatttctttttactttttgaaaaacttacacaattcactgacgcattaacttttaccaaaaataaaaaggcaactttcattcatcattgaataaaaatcaccttttaatttgagtaaatcattatcagcacattcattttgtatatgcgttaagcgttgcacattacaaatagatagttatgacttattagattatttaatttgactcaccatcgctaaaatttcgtcagtaacttcttcaatcgacttgcctgtcgtatctaatgtcactgcatcatctgcttttcttaatggtgatatttcacggttcatgtcatattgatcacgagcttcaatatcacgttttaaatcttcaaaatttgattcgatacctcttaattgattatctttatatcttctttctgctcgctcttcaactgatgcaatcatatatacttttaaatctgcatctggtagcactacagttccgatatcgcgaccatccattacgatacctttttctgcagctaactctttttgttttttaacggcgaatgaacgtactggctctttagatgcaacgtatgaaacatgttgcgtcacatcattatttcttaaaaagtctgttacatcttcgttatctaaaatgacacattgacctttatctgctttataagttaaatctaatgttgtttggtcaactagttttgcaaagtcctcagttttgtttaattttaaatatttgtatgttaatgcacgatacattgctcctgtatcgacataaatcattgatagttcgctggctacacgtttcgcaattgtactttttccggcagcagctggaccatctaatgcaatattaatggctttcatgcgtcatttcccttccttgtcgttttatgaataatattttatcataattaggtaaattaaatataggaggaaatatatgaaacatctacttgttattcatactggtggcaccattagtatgtcacaagaccaatctaataaagtagtaacaaatgatatcaaccctatttcaatgcatcaagatgtcataaatcaatatgcacaaatagatgaattaaatccttttaatgtaccatcacctcatatgacaatccaacatgttaaacaattaaaggatattattttagaagcagtaacaaataaatattatgatggtttcgttatcacgcatggtaccgatacgttagaagaaactgcctttttacttgatttaatattaggtatcgagcaacctgttgttattactggcgcaatgcgctcgtctaatgaaattggttctgacggattatataattatatttccgctattcgcgttgcctctgatgaaaaggcccgtcataaaggcgtgatggttgtatttaatgatgaaattcatacggcgcgtaatgttaccaaaacacatacgtctaatacaaacacatttcaaagtccaaatcatggtccgctaggtgtattgacaaaggatcgtgtgcaattccatcatatgccatatcgccaacaagcattggaaaatgtcaatgacaaactaaatgtaccattagtaaaagcatatatgggtatgccaggtgacatttttagtttttatagtcgagaaggtatcgatggtatggttattgaagcgttaggacaaggcaacatacctccaagcgcattagaaggcattcaacaattagtatctttaaatatacctattgtgctagtttcacgttcctttaatggtattgtgagtccaacttacgcatacgatggtggtggttaccaactcgcacaacaaggttttattttttctaacggcttgaatggtccaaaagcaagattaaaattattagtcgcgttaagcaacaatttagataaagctgaaatcaaatcatattttgaattataatgaatacgtaacataaaaaggtctatgtacaatcattagtcatcaacctcatttgacatatcatgaatgtcagtcgttgtaaaactaagttatttagtacatagacctttatttttatgattctaagggcgtttgtttcttagctagcatgctttgagcaataatgcccccgtggaatttaccattttcaataaaaatggtattcgcatcgttccctgcagcaattacacctgcaatatagcaattttcgatatttgtttcgtatgtttctttattatacataggcgctgttccaaattcatttgtattaatttgaatgcctacagattttaaaaattcataatcgggatgataaccaatcatcgcaaatacataatcattgtgtatcgttttactttcaccatttacttcataagtcacagtatcttcagttatttgggtaacattagcattaaattccatgtcaattttttcatgatttactaatgctgtgaaatttggaagtatccacggtttaattgaaggcgaataatctccaccacgatatagaaccgtcacgttagcaccagctttttccaactccaaagcagcatcgatagccgaattcttaccaccgataattacaacatcttgatcaaaatacggatgtgcctctttaaaataatggaacactttaggtaaatccgcaccttcaacttctaatgtattatgctgaccataatagcctgtcgcgattgttaaaaatcgacattcataaacatctttcgtcgtagtaatagtaaatttattattcatttttttaacagttaatacttcttcaaatgcatttacttttaattgatgatgttttacaacttctcggtaataaactagcgcttgattacgtcttggtttactttcttcaacgataaacggtacgtccccaatacttaatttatcacttgatgagaaaaatgtttggtgagtaggataattgtagattgattcaacgacattacccttttcaataattaaggtatcaataccttttcttttttgttcaatagccgcacttaatccgcatggccctccaccaattatgatactttcaactttttgcattgtttcggcctcctttaatcccaaactattataacagttcagtgattgatgcgctaagtctgtgcttgaagatttatgatatatttttgacaatttgtttaatgtgcatagagaattgttagctacggagttgaataacactacaatttaatatgttgatttattttttattcttcctcgttaaatttgttgattgtggtgttttatctttttgatgactatttaaaaagttaaattgatatgccaatattcgagaaaagaccttgttaaataacaaactttgaaaaatgaaaaaaccgctacatacttataagcgcaatttaagttctccaaaatatttagagatacttataatatgcacgtttgtatatagcagttcagttacaatttatatagttatattatggaataacgatttgttgaccgtttctaatattgttaccacttaaaccattggcacgtctaattttttcaacattttccggtgaacctgaaccgtagtattgaattgcgatacggtataagttttcttgaccattcactgtatgtctttggccaccaccttgacgttgttgttgctgttgttgattttgattagcttgttgttgattttgattattttgtgcttgattgttcgcttgattagcgttgttttgatcattatcagattcatctttagtcgctttgtcttgatcctcttttgatttatcactgtctgtagattttgatttatctttagaagcgtctttagatgtgtctttgtctttactttcatcagcattatttttatttgtattcgcgattttattttcttttgtaccattattatgattgtttaatgccatgcctccaaatatcgctaatgcaccgataattagtacagctgcaattaatggtaacaatactttggccatgccaccttttttacgttctttatctctgtcatgattgtcatgttcatcatggttttggcttgcattattagaggcatgtggttttgaagcggcagaagcacttttacttgctgcgcctccagccaaacctgctgttccagcaccgatcgctgcaccttttttgccattatgatgatctttagacttatcttgagacgctttatcctcagtcgagttattcgccttgccagaattacttttgttttgagcgtcatttgaatgtttcttagctttagaagcagccattgcaccagctgcacctgcaacacctgctgttccagcaccaatagctgctgcttttttaccattatgatgttctttaggttcatcttgatcttgttttacagaatcattatcatgttcattttttgatgtttctgattggttagcacctgttgtaaaatatggtttaggttgctgagattgttcagcttcactcttatcagaaactgttgaatgctcagtgttattttctgcatttttaatagtatcgtgtttatcattgtcttcgattggttctggatgtgatttatccattgcaaaagcattcttattataatattcctcttcatgttgaggtgtactgtcttgatggctaggttcttgactttcagtactgtgtgatgattcgacttgacgatcatctattgtgccagcctcattttgaacattgtcttcagatgtttgtgattcattgtgaacttgtttattatgattcgttgctaaatcacggcgtctttttcttctttgggcatttcttggcggaaactgttgctccgtattctctattgtatcctgatgttctaattctgattggtctttttcaacatcttccgtatggtcttgatgtgaatttgtgtctatcgattgacgatttttttcaaagtcatctttaaaattattagacatagccatcttcctttctattctattacaatgattttacataaaatatacccacatgacatatgtttatgtatatttttcaaaattatttcaatcatttttcaattgtgtatacactaattatagcttgtcaattttcttttagtaaagtaatactatctgagaaataaattttgcaacttttcatcaaatccaatacttctaattaccttcttcttatttaaaattgcgatatcagttatattagaatcattgtcacaacatcgatcttgtgccggtggatattcaccgaaaaattctaataaatacttccgtctacattgatccaatttgcaatagccaatcatgcgaaagaatcctaattgctttcgtttaaatgattgcttaaatatctgtttcaaggcgccgatactatagaatgattgcaacgttgtcaaaacggcttgtttatcgggagctaaaaattctcctatttcgaaattttgtacatcttcttctgttatcatatctgcaaataataacgtttctaaaatatatttatcgtccggttggaataaactaattgcctgacttagttcaccatcgcgacccgcacggccaatttcttgaatgtagttagaaggacttgttgaaagatgaaagtgaatgattgtgcgaatatcttttttattaattcccataccaaaagcactcgttgcgactataatcggaatatcattatttaaaaattgttgttgaactgtgtgtcgctcttgataattcatatcaccatgataaatacctgtaagaaaacctgaatcataaataagttgcgctaaattcagacacatctttttcgatgagacataaataatcgttggtcccgactgttgtagaaacggcagcaaccattcaattttatcttcatcatcatgaaaattaagatgcttaaagcttatatttgggcgattcattgtagttttaataacattgaattgaatcgctaacatttccgtcaaatcatcttgtaaatgcggtggtgcagttgctgtcaatgctaagacaaccgcttctttaaaatgctttgttacttttcctattagagcataatgtggtctgaaatcatatccccattcagataggcaatgtgcttcatctagaacaatcatgccaaagtctatcatagatattaatttaaaatttgacggttgcaggagaaattctggacttagaaagatgaagcggctatgtcgtaaacatttaatattatgctttttctcaatttcatccataccagagtgaatacatgttacacgtttttctccatttattttcaactgcataacttggtcatccattaaagatattaacggtgagataattaatgtcggcttacctgataaatacgtaggtatttgataacacaaactctttccacttccagttggaagtatacctagagtgtgttgttgagacattatactttctataatttcctgttgtcccggtttaaaactctcgaatccaaatttgtttcgtaaaatatcatgcaacattcagatcacctctttcaaatccaacgattaatacttttaattgaaaatatgataacgtgtcaaattgttctttgtaaaattttaatcgttcgccacgatgctgttgataaaaattcaaaaactggagttgatcttctagttcaacataatcatcgtaattagacatgtaacctttgattaagatttcaagtacatgatcttcgatagtattgattttaacttgttgttgagccgctatatcttccatcgtgaattgttcaagcaattttgtataagtaatataagtttgatttaataatgtaggtttcattattatttttgataaaatagtatattctccactttctaattcaaacatcattgtcactaaattattcatttcgtattcaaacaattgctgttgagatagcttttctattaaactaacttgctgtctcgtatacattggttcatcatagccttgcaaataataatgtaagtaacatggcccttttaaagttattgctttaaacaagttatgtagttcattttcaaaatcaatttgtaattggttttctttaatgtagttatagacaatctttacagtttcttgtatcttattattttgagagattggtacaaaatgaaaaacatgttgtttggtattagacatggtttgcactaatagttgaattgcttgaaatgtttgccccatgctttcaaatgtatatctaggatgcaacatgatttccatttcagcattaaattcattgattttttctaaaaatagctcaaaagacggatattttaatagtggtaaactgtgatataatgacaactgttgttgactacaagcgtcaaaaaaggtttggtgagatttcttaccaactaagatattgtaaatacttttatttgttttatagttaaatgtttgttgtaatgctgtttttataatgtgttgcaaatttaaccctcactctgtaaaacggataatttgaaaataaaaatgatgctgtctaaaattttagtcacattactattttagcatttttatcaaaggaggcgaagacattggcaaaatatacaatcgttgatatggatacttgtattgcatgtggtgcatgcggtgcagcagcgccagatatatatgattacgacgacgaaggtattgctttcgtaatccttgacgataaccaaggtactgcagaagtacctgaggaattatatgaagatatggaagatgcaattgatggatgccctacagattctattaaaattgcagacgaatcatttgatggggacgctttaaaatttgaataattgattttttagacaaatgttctatagaaaaagcaggcaagctatcgtttattgatagtcacctgctttttattattatgtgtatattattttgctttaatttgattaaattcttttcaagaaattcgcaagccttctatatagtaaaataaatacaatagaaataacgatacctttaataatattgaatggtataattcctgaaacaatgattactttaagattatttgcgatatcagctaagttaaatatcataccgtacaaaggtaatagaacgaaatagttcaaaatactcaacacgatagtcataacgattgttgcaatgattaatccagtaatcaaagattttgttgaacgtttatttttatagatggcgtaagcagttaataagaaacttgcgcctgctaaaaagttagcaaatggtccaactggatcgcccatactaaataagtagttcaataaatttttaaccagtgcaactacgataccggcaactggtccaaacgtaaatgtagctagtagtgacggtacatcactaaaatctaaagttaagtatggtggcaaaaatggtataggaaacttgataaaagttaacacaaacgcaatcgcgctcaacatacttattgtgataagacgtttattttgttgcatattcaattttctccttccattcatctcgtaagaataggaggattattgcacaacaaaaaacctccatcttctcccatccagactatactgtcggctctagaatctcactagatcagccactaatatgatacatactagcaggtcgcaggctttatttactgccggttgggaattacacccgaccccgaagatgaattttacattattaaatttaattctcattaattttatactatatatcacaaaacctcaataactatgcttaaattaaatcatagttacgtaattggagagtgatacattggtgatttgcgagcattgtttggaatgttgtttgcttgattaatttttgagatggcttttttgattctatcactcaattgagtaaaaatcgtcataaaatggaaagcaaattataagaatctagtaggttaaaaagttttatatcagtacttccatttatattattatttaaatcaccagaaattacacttaaaatcttctacttatttgccttcacaacaatagtagaattatctttttattcttgatctactcaatatacactattctccgttaaattttcatcattaattttattcttgatcaaacacaccatattctgaagtgctttcaccgttaaaatttggtttaaccgtatttattttattgtccgaaaattttatactaagctctataccgtttggtatctctttatctttttttatttcttctgccatttttattacattttcactgttactttttttagtatagttcttttttttactaaatagagtagtagttaccgaaactttagacttatcttttaattgcttcttaacatttgacaattcttttgaaaattcactgtcacttttgtttaacaatggttcaaaatagtctctatactcagctaaattataaggtatggccgaaatataaaaatattcattttcataaccactattttgcgtcttattaattgcttcttttgtaaatcctgtatattgatatttctcttcattatctttgaaaaatttatataatttatcatatttttctttttgtgctcgatattcaaacccactgagtactgcaccaactaaagtactcatatcatcacctttatccttacttcttaatgagctatcactgtcaataattgatttatcaaatggaatactcgcattaaatacgatgtcgtggtcatcacaatgcacgaatacttctacaccatcgccactacctataacatttgtagctttaacttttagaccgaagttatccataaaaaattgttcgcctcgcttagcaattttatctttatgcttctttgcaaattcaatcgcatctttttctgcaggtggttggaatccttgtcctacatattttgaagcatccatttcttctggtacagattttgtttctttgttggattcgttattggtagttgaacatcctgatagtagtatcgttgccattaagataaattttgcttttttaagcatatctcatcacctatttatgcgcttttaaaagtttcattttgtaaataattatactctcttaatttatttgtgtcttttagtttctctctatataaatcttcaaatacatctgcctgcttaaatcgtttttcgttaactgtaaagtcattatctttattgatgtcttgataaaccctatagctactcaattctgttaaatctctatcatttattttattcatcttcaaatgctccaaacgacactactttcttatcatcaaaacgagctttttttgtgccaataagtttatttcctaattgagtagttatagtattcttgattggcatatcttttgttctttcaattttctcggataaatctattacattatttatcttttcttttctattcctttcatcattcgtactaaacaacgttgctacagtatttgtattagcagtatagtttagctcttttctagctcgttgcataccttctttaaactctttatcatttttatgtatcaatggttcgtaatattttctatattcttttaaatttcttgataaatatgtaatataaaaatattcattttgatacccgacgttttgcgtcttgttaattgcttctttagtaaaacctgtatattgatattgcttttcattttcttttaaaaatttatataaattatcatacttttctttttgcgctcgatattcaaagccactcagcactgtacccaccatcatactcatatcatcaccgttgtcattactacgcattgatcctttttgatggatggcatctttgtacaaaggtagacttgcattaaatacaatgccatgatcttcgcaatgcacataaacttctacaccatcatctttacctacaacatttgtagctttaacttttagtccaaagttatctttaaagaattgttcacctactttttcaaattctttacgatgcttcttcacaaattcaatcgcatctttttctgcaggtggttgaaagccttgtcctacatattttgaagcttccatttcttctggtactgattttgtttctgtatttgtttctgtatttgtgtctttttttgattcattattcatcgctgaacatcctgataacagtagcgttgctattaagattaatttcgcctttttaaacatagctcatcacccatttatgtgtttatatagaatattaaaaagcattttaaaaaaatttattcatctttacgatacactccatattctattggatcattatcatcataaaaggcttttttagtattaatagtaggctttcctatttgaattgtaattgtagatttttctggcttatttttaaaattatatagtttatcactcagttcaattacatcatcaactgtattgtctttagtaaaattttcctttgtactaaacaatgttgttactgtatctgtattagcagcgtaattcacttcttttctggcttgttccattccttctttaaattctttatcatttttatgaatcaatggttcgtaatacttacgatattcttttaagcttcttgacgagtaagtgatataaaaatattcatttttatatccgacattttgcgtcttgtttattgcttcttttgtaaagcctgtatattggtatttctcttcattatctttgaaaaatttatataaattgtcatacttttctttttgtgttcgatattcaaagccactcaacactgtaccaactaaagtactcatatcatcgcctttgtcctcacttcttaatgagctatcactctcaattattgatttatcaaatggaatactcgcattaaatacgatatcgtggtcatcacaatgcacgaatacttctacgccttttccactacctacaacattggtagctttaacttttagaccgaaattatccataaaaaattgttcgcctcgtttggcaattttatctttatgctttttcgcaaattcaaccacatctttttctgcaggtggttggaagccttgacctacatattttgaagcttccatttcttctggcactgattttgtttctttattagattcgttattggtagttgaacatcctgatagcagtaatgttgctattaagattagtttagttcttttaaacatagctcatcacccatttatgtgtttgtaaaacttttatgtttgaaaaagctacttattctcaatgaaaacaagtagcatttaataaattaattagtatacagctagtttttctaattgttctttaacttgaattaagtttgaccgtattagagaggcagattgatccatcgtttgaattgcttgtccttcattttcgttcaagccattacaaacaacttcaaactgttgtgccatttgatcaagacgcgcatgagcttgtgtgtttaaaataaacatatcgtcataatgtgatggtaaattgacatttcgtcgttgtacgcaaatgtataaaacccttgttataccaagttctttattatttttaaccttttaaattttccacaagtgtttgtccttatttaaataatccgccctttttttgccctgaaaaaataaccacgtcaattaagacgtggttaccctaatatagaaagaaagtgtttgtaaattttaacatatttaagattttttgattatctatctgtttagctcataggatttttttccttagattgagtatctattaatttaactgtatgattttcccaatcaacttcataaattgatgtatgagttgctctattttcatctttataattattacctatccagtgaagttgattccaaaagtttgtatatctatccatttctctttgataagtaacagtaattttcgatttttttgcagcgttttgttttcgagataggacaccaataaattctggattgaagttacctctggataacactggcattttgtgatattccaagaagttttgtccagcatttaagttgctttgtcttgagcctaaaaacatttcattaccataagttgaatgataactatctctgccatatggtccccaaccattattcataattttatgtgcttcaacatcccaaccaatttttttgaaattagttcttttatctaagctagttctatagctttcttgtttatagttaattgtctctgaaaaagattttgaaccattacctccacctgataagccgttagagatattaatatctccaccataagaataacctaccgtttgttgtacttgaaattcttcattttgatttttaggtgcataatctacaacgtttactgagtcattagaatctgaattaattgaaatgttgtacttagaaccccaataaaattgagaactaatagtgtcttttggatttggctttgtatagccagaataaatgtttccagcagctttgagtattaatgtatctttatcataacttttatctttaataaaattaaaagttaaaatctgagaaatttttaacttatcggaatctgatgttgcagttgttttgtacaaagtaattttatcatcaacctttttctcacttacaggtgtgatatgttgagctgcatcaactgtattggatagcaaaagcaatgcaattgatgtaacaactgatgatttgactatttttttcatatcaattatgtcctttcactttaatttcatgagttttccagttcacttcatatttaactgtgtaatttctgtttacaaatgcgttgtgtattctagatccttctaaataactattgccatagtgtgttgttcttctagtagcatgagtaacatccatatttctgccatacgttatttcaaattcacttgtatctcctgagcctttttcatgagaaacagttgcaataaatgaaggattgaaaccactgtgtactaatgggggtaattcattgtctggaacaaaatagtctctcggattttgactatatggtttatatccaacaaataaatttggatcatgtccagacattttacctaatgatgtgataaatgaattagcttttattccccattgaacactttttgaattttgacgttctacttcactgatatagttttgttgattataactaattgtttttgaataattaaatgaaccattacctcctgttgatggaccactattaaaattaccacctatgttataacctaatgtttgactaacatttactgaatctattttatttttaggtagataatttattaaatctacattggggtcatttgttttgagaccaatattgtattggaaaggccacctcattgcttttatatgatctgtgtttttgtaattgtaataagtagtctttgaattgataaaaccttgcatttttaaaatcaaagcgtctttgttatactttttatctttaacaaaatcaaactgaatattttgtgtgaccccccacttatcgctacttgtatcttctgttcttttgactacctcagcgccatcaccaatattctcaatattgttatcagctttagattcatgaaacgaagtagcaataggagtgattattcctaacgacaatgttgcagctaatagtctttttttgaccataaaaatcatttcctttctttataaattttattacatttttatattaaacctttttaacttttaataaaattaaatatttattaaaagatttaccgagtttaaaatatctacaaatgtgtttttttactattatttcgaaaaaaacccgttcattaccaaacaaattataaataatttatattttgattgataataaacataaaaccacgatatagttgaccataacaactttttaatcatagcacacaatacgaacacaaaataatttatatactaaaaacgtttgtttttttaaaatttaatatattcatgtaaaaattaactgtttattaattttaaataataggcaagtaccgaagtacctgcctaagattcatcatatacaattatcaaactgcactaaacttaccaaaactgcttattcggttgcctgctatgtctacctctccggtcgcaatatagcgacgttgtccactattagcaatataagtaatccatctataaccattaatacaatatgcaccgtcatacgtaattgttgtgttgttgggtaatacccctgtaattcttgaattagttgaataaccgtctcttacattattacctttaacattagctactgtgtaattgccttgttcttttttataagggacattattcttatcgagtgtataacctgctggcactggcggattcttttcgtttttaactggcgctttgacctcactagctaccactccaccaattggcttaccatgaatcgcaccagctattagtttagagtacaagtcgtaatttttcttaatccaatccatatcatttttattagtaataaaacctaattcagataagcgataattgatatttatttctgctgatacattaacatttagtaaatcgttacgaggtgttacacctcttatttgtcctaaattatttttaataacatcttgtatacttttatcaatagtatctgcattgaattgacttgagataataacatgcccaccacttgcgctttctcctgctgcgtctaaatgtatttctagaacaatgtcatacccctgtgatttaacccaatataagccataatcttttttattgcctacattaacaccgtatgcagtatcttgatacatatcttgtgattgacttgagccaccgtataatgcaacttcatgtcctgcatgtcttaaatacttagcgatattaggcgttatatatttacgtataaaatcgcgttcgtttgttccgtttcctactgctccaggatcgttataaccatgaccggctacaagcataatttttttaggtttaattactgcctctttttttgtagtcgcttgcttaataatacctttagctttattgccaacgcttaagttgttagggaagtttaacctaataaaatacattggattgtcataataatgaacatgtcttgtcacagtttcaggaccccaaccaggttgcgcaacgccattagtccaacctttaccgttccagttttgaccaaatgatgtgaaagtgtttaaatttgcgctctcaacaatttcaacgtgtccagctccgccaccatactttgacgggaaaacgacaatatccaacttttgcggtaaaaagctgtcatagtttttaattatttgaccatatttttcaatctttgctttattatcaaacgggatattataagcatataaaccttgcagcctttcgcctgtcgctaacataaagaacatattggcgtaatcataacactgaaatccataaaacaaatcaggattgaactgcttccctaatgaattatcaaaccatttttctgcttggttttttgttatcaacattggtcaacacctaccctaaatcatttgtgtcgttcatattcgtaggtgtcattacttctttaattggcgcttgccctgttgcttttctatatttactttcagctttatatttctttaatttttgattcgcccatttcccttcttgagatgttggattatctttatatgtagtatataaagcaacaactgttaagataatcgatgaaacactttcttcatctactggtatcggacttatacctttattcgctaagaattgatttactaatgctaagatcaatacgatgtatcttgttattacttttgcatccatttgtttgctccttttatccaaaataaaaagccagtgccgaagcactgactcttaaatattacttacacttaccaaaccagaaacacgaccaaaagctatatcctaaaattcccttaagcatggtgatcacctcctttaaatgccaaaaatagtttttaacaaggctataacaaatgtacttagaatcgtccctattaatcctagaatccacatcttgatgtctctaatatttttagcatttttctctttatttttttcatcttcttctttgtcacgccttagttcttcgaaatttctatctaacttgtcataaattttttcttgcgttctcagactgtcttctattctgtcgaatttttcaaacatagtcttatcattttcttctaatcgcgttaaacgccaatcttgttcgtgtcgtttggtaaatccaaacattacaccacccactttattcaaattaaaaagccataagattataacctatgactctagattttctggatacttttctcctgtaataattgcatattcctctttatctataacttccatatctacataccacgctatatcttctttactatattctttcaattgataccatgttttaatatcttcgaatgttggtgaaattaatttaagcattttcagtctctcctttaacctcttctaattttttattaagtgtcacaagttgttttgccattagtgcattttgcttattaacttgcatcgataactttgtactttgaacaacttgtttctgcatactagcaaccatttttcgtaagatgtcatcagaagcgactgtgttttgttcttcactgtcaatctgttgatgcaagtcatctttttcttctgaataatcttcgttaaaaactatttccccatttgaatatttaaaggctttaggtctaaaaacttgagagaaattttctggtaaattttcaatatcaataccttcttcaaagccgccaatgatagcgtatgaaattatctcattacgcttgttaactaatatttgcattattttctcactcctataattttgttaattgtccctctatttgcgttcgcaccagagcctctttgacttcctaagtcgaaatagacatcgtttgatatagttaaagatgtacgactagatttagttaatccaaactcataaacacctccaccatttccatcaccatctggaagatttgagggattcaatgaaatctttcctcctccaaaaggactgccaaactctgtaaagtcaccacctggaaaagtcccataaaaaattaataaaataaattggtctaaactctcatttaagtacaatgtagagcccacaccatttgctgttccatcaaaaataaccgaataccttttattaaacttgtcatctgcgtataatttagcgttactttcggccatattagcttttgattgggcactttgaacagtttcaaaaggtgtattgtaatcattaatagctaattctgaccactcagaccatgaacccgcttcttttcttttaacaaacactttatttgtaccgttcggtcgataagtcatacgcttgtaatctgaagttactactaaatattcgacagtaccgttagtactaacatctcttggataatttatagcttgcgaaacataaataaattgggttgaatcacctattctttgttctggattattaaaatcaaatccagtaatctgcattatcttaccatcatctttagtaatcttagctttttgccaatttgaagtagaaccacttgtgactaaaccaccactattcactgactgcttgaaggcttcatgtttctcatccatatatcgcttttgctcatcgaatgttcttgaatatgcttgcgctttattttccaaatcagatatacggctattagcaagttgctttaattcatcaatacttgaagattttgctatttgaatatctgatagacctttttctttagctttttcaatcagactcgcataatcctcaccattttttatagcctcgtccattgctttcgcgcgatccataatagttttttctaattcttgaaactcaacaatatagtgtagttttgtttcagagggaatcttgctaaacaaacttttttcaacgttaaatgtgatagttctctctacaactaccacgtctgaattacctaattctgcaaccgaaacttgagcttgataacttccatctcttttaattacatcattaggtaattgaaattttaaaatacctttaaatggatctaatatttctagtggagcaactaccattactcctttacctcgaatcgctattcgtgctttgatattttcttcactcagtaataacggttgattatttttaatgatattaaaaagaagaacagaagaatcactctctcctgttctaaaagttatatctagatttgaaatattttcataatgcgctgtgttttctaaatttatagctacagatttctctaaattactcattaacttataattctcccttcgtgtaaagtccatggccctgaacttgttttactatcataatttttcaatagtatctcagcagatgctgtaacactattacgaactagcctatgaacaaagccacctgtgtttgaagcttctacatataagttccaaccagctacccctttacgttcagttggaaaatctgtaaaacgttttgtatcatccgtagttaaataaaacgacatgcctactatgttaatatctgacatttttgtgatgaatgaaggtactctctcccatttaccactatttttaggcacataattccagtccgaaatgtctccagttcttccagaaagcaccctttcaaaagtcatcatattccttgcataactattacgcgtcaatatctgaattacatcaccgccagtttgtggtggcttaacttccaagaaccaacctgcatcacgccattctcttggtaatgggaaatcatcgatttgaactgtatgatcagtgtataaatagtaaagacctggctctgttaacatcccaagattcttaagtttatcaggcctcattggtaaaggtttaactctaccacctgtgtcactcatgataaaaggaacgcctcttgagtgaagtatttctaaaatacctctttgcccaatcatgaaaatacgatgtgttctatttccatcaccaccgacagtaacacctagcatcaaagcttttttaccactatctttgtcatagtatatttgcaaaccttctgcttccgcaaattcgccaggaaatgaatctagtgttccaccatagtcagcattaacctgatacgcttcttctcctgtttctaaatcgaaagccgttaaatagtttctattatttggattactgtctcctgtataccaatacaagtatttttcatcaaaagtcacaccctgcattggttgggtttcgtttgttagtctcatagggatactgattttatgcaaaactttatcaatatttttatcaacatcgtctaaacttcttatctctatataattcattgagttttcaagttcccactgacttctaggtctctcaattctgtatagaattttattttctttttcatttatgacaggggtgatgtagggtttttctgggtgtcctgtaaatacatcttgcataccatacttgccatagctaatttccacattaggcgtatacttgaaacgaactaatgtattctcattattaccatttaagataaaactataaatccataactcatcatcaatatatctataaccgttatgtgtaccatgacccccacctacaatcaatgagctgtctataaattgaccattaggtcttaaacgacttagcatatagccattatttctagcttgtgtcatgtatactatgcctgttctattatcaaaccagaaggattgcattactgcatttgtaagaggtgcaagttctgtcacaaataaaaactcttgcttatcaggttcaaaacgatactcgatatcaagaatttcttgtttggtcttatttaattctcttatagtttcctctttattaatttgagttttggtttcccaatcgtctaaatgttcttttaatgtgtcaaaggtttcgccgtttacattaactcgagcttgaacaatctcattagcactgttattacgtggtgccacaacaagtgcgttaatttgactttgtaaagatttgtttactgctgcttgcgatctaccattataataaatttgctcagcgaagtgttgcattgttttagctttctgatgcaacttaaactctgttgtcaagccaagcgcaaattgctctattctttgcaggttttgaatttctttagctctataatctcgacctgctaaagctcccaaatcctttattaaatacaaattttccataatgcaccttcctttctaataaaatagcactgtaccaagtttcccactatcgtcaactgttattttccacaatttaccgtttggggatttctgtacaatgctattttgaataattcctgcttcgcctatttttaatttatctaatttatttttatcatctaccgaaatgataccgtcttgaggcaatccatcaatatcactactgcctgcataaggtatcccatttatagctttccagtgtgtagctggaaagtactgtttatcgttttcaagtagcgctttgattttaacttcttctgttgccattatattaatacactccctatatccattgtctcgaaaggagaattcaaagtactagtgtataaatgatttatacgatttgcttgatagttatatctattatcttgtgcaataactcgtctgttaagtgcttgttgaatttgtaccatatcttttatttcattgctgaaagacacttcatctattgcgtttacaaatggatgtgacctatcaagtttaacaacctttaattcagtgttatatcccattaattcatgaacaaaaaatacgctatctcttggctctattttttcataacctatataattaacatctaattcagtcttaggagtatcatttatttgcttttttgcaaattctaacagcttatcctgtgtttcgatatcttcatttgtttgcgtattagcatatcgaatcccaaactgctttgcactatctgcgacgtagtcgacaattgctttgtattgattgcgacctgaattatcagcaattaaatttaagactgttgatttttcagttccaacatacatacaaggcttagcttttttatttgaagatatatcaattctatttttggggtcttctcctaaaaatatcatttctaaaacgtgcttgcctttatcaatattttttattaaatctattgtttcagactgaaccgacttagcaaaacaagaaatttgcttaatttgcttgccgtctaaaatcaacttatatattccaccttgagagcccttttttattgtaaatctaactgtttcattaccatacttgcaatcaaagttaatagtagctttagacccaattgtttcggtacgataagtaccttcttttataaaaccatttgaatatttaatgtcagttgttctaataggattataatttttcttttcctcagctgtatacttttttccaaaaacttttatagctgttcttaattccaatgtactgacagttgcagatacagtatcagtattatattgatatcgaatcactttctcgcttctttgataaaatgtttcaggagaataaaaaccaatctctgtatcatttgggtaaattatacagccaaacaggtctaccgcttctttacagtattctaagccgtttttgttacctaattcgtcaatcggtacttttcgcttaaaatctccaattattttataggtcattttgaccgaagttttttgatttgcaaatccatatcttaagtactcatctaaagagtattctggcgttttaccagtttcgctactgtcgtcatcaagcttatttgattccactgagtgattttgaaattcatacattatgtgatatgccgtaacttcaataaaaactttatcaccttcaacctttggcgctgtctgcttaattgtatatttttcaccatgataaattatgaagttttcacaaatcaataaatcaaaaacaaaactattatgagtagttctataaactgtaaaggtgatgtacctagcttcattcagttcataatattctttaaaagaaccataatctacatctagtaaattttcacaaatcaattcattaaaatccattactgataaatgatcatgataatccattaaatcacctacctataaataaaaggaaacttaaatgtagttttaatatcactgacgtctcctttaatcttaaattcatttttacctggcgctaatgttataatgcctctatttgtatcaattcccactctatttatatctcgatatgcatacacaccatctaaaacaaaatcagtgtttttatctatacttttgttgtacttaaaaatatcacctgttgtatagttaaccagttcaaatcctccactcgcatttaaattaattaatattttcaaatcgtgcttgaatcgtggatttatcgtatcagtagaaccgttccaaatagtaaattgatttgatgtatgagtatatttaggtgtgaaatcaagaggaattccattttcaaacatccaattagagtcgaataagaactcgctatcggtccaattaactgattcagaataccctttataaacatttaaacttacttcaatttcagttgaagaaccatcttttaaattagatgtaacattagctgtattcactgcatatttaacaccaggcatttgagaagtaataacataataaggatgtctgcgattaaacacagatctaaaccaatgctcaaataaatttaaatctataacatctataccatcatagccaaaccttaatactaatgaaaaaggcgcaaaactaattgcgcccggtaaaataccatctactccgttaatagttacactgttatcattggtgtttggactttcagcccttgcatctaaaaatataagctgattaaaatctgttattacttcttccttgtaaccatctatgatttttacaaaagattgcattaattagtcaaacctcccatataattatttgcatttgctctatgcccactttgttttgacaatattttttctaaacctctaattgcatcattagaacctaagttattatcctgagaagaaacagtttgaatcaatgcatctgttaatttatttcctttatcacttaacataacaatttgtttcaacaatttttcaactgttgaagtatcattatttacagtgatgttatttggcttgccatccataccgatgatgcgcataacctgttcagttaattgaattgctcgtttacgtctagttaaagggataaccatctcctgtttatctccttcacccacttcagcaagttgatgctttgtaatcaaaccaccattcgcatatcttcttggaccacttggagaccaaccacctcttgggttaaactgtgagcgccaatatctgttgttaaagaacgctaataactgatcgtaaccactatatatattgttgtgacctctaacagcataatgtctaaatgtttgtgggatatattgaagcaatccttttgctggattgccctgtaaaacgttgatgtctctaagcgcactagattgagttatacctgcatttcctcctgattcgtgttgaatcaagctaataatatttcctacatcacccgaagtaacattaacacccattcgttttgctgcacgacgtatatcgcctgcccaagcagatgcagccttattaacacctgaaccacttcgaacgccactacctttaagtgacttcaaccatttttctggatctttagctgtatcattccctggatgtgacccttgcatcaattggaaatgtaagtgtgctcctctaacgaaattacctgtagcacctgatttccctatcagttgaccagctttaatacgttggccttgtcttgctaattgcttagataaatgcatataccagttccattcattagcaccagtcttaatttgtatagaattaccgccaccgtaatcagtccataccttatctgctataccacctttaacggcataaacgtttgttccagaaggcataccaaagtctataccatagtgacgaccgccattaaagttaagtccacctgtgtagcgtccaaatctttgccagattggatattcaaatagatagcttccatcgcctccaccaccgaaatcttcaaaccacgattttactttgtctactaatttctttttgagcaatgagtatgcgcctttagctatttttactgtagcgttagctccgcctccaaaattaatatttaaacctgacattactttatttactagtttccctggatgttgtacgtaatcccacacatcgccgattttatcgcctaaccaagatgcaccatctttgattttatcgcctgctgcttcaaccatttcttctgcaccttttttgatattatgcgctgtgtttttagctgtagctccaaattctcctgcttttttacctatattacctttaagttggtctagccaatctttctttttcgtacctccatgaaactttggtaaaacacccatacgctgtaacttcagagtgtcattagcatttattacgctatccccaactcctagtggaacaaccacatctcgtccttggggtgcatggaatgttccgtcagccctgtgaattacttcttgaactccaccacctggggcgtttccagaacctctatcatttaatacagcaaatgtcggttgcgttaatgctcccgaattatcggtagctacaccctttcctgctaaagtaccagtagacaatgtaggtattggcttgatgagatttttatcagtaatggctttagatattttattaataccgccaatcatgctattcaaaccgccaatagctttattagcaacatttttacctaaatcagccgcagctcttcccatgtctttaccaatatctctaatccaatcatatgttttggatagccattttctaaaaccattaaatactgatttagcgttagaccatgccgaacttgaaattgcatcaaaacgatcgtgggctcttgaatacatatccccagtccaatcttttaaagatttgtatgagttactaaaccatttcgatgttcctttccaaacggattttgcattcgaccaagctgtactagaaatattatcccatttcgcgcgagatttattagccatatccgttagccagccctttgcacttttatatgcattgctaaaccattttgatgtgcctctccaaatagattttgaatgcgcccaagctttatctgaagcatctgaatacttttgcttagtttgattgtaaatacttcctgttgtcgatttaacagattgccaagcttttccaaaccatttaccagtactattagctatagccttagtgtggtatcctacagaacttttggctgagctccaacctgaacttaatttgcttggaatccctttgattccgctccacatttttttcatttcgccgccaaaatgattagcatttctgcccattttactaaaggcttcgccagttttactttttacgccgtcccaagcatttccaaaccatttctttatattttctctgtttctacgagctgtttcttcttgttctttagcgtatttatcgctttttttcttttggtcttctctaaagttagaccaccaacttttaaggccattccaccacttttcagtatttttatatacacgtccactggataaatccatttctttatcaatatctttattttgctttttaacaacatctactacagcatcttttttagattttgcttttcttacttcatctttatgtctttgatcagcaatagctaacaatttatctttttcagacttagaaaggttgacgttattttttatagcaatgacatcatcttcatattgcttgtccacttctttttttcttgcttttcttgctttttctgcttctttaattgctttgctcgcttcgtctattgaataagcatttctgtttctttgcattcttactaaaatacgctcttgctctttttcagtcttactcaattctttaacagtgatatcacgtctttgattttcaagcttttcaatttcttttctttcattttctgaaatctgaccatcactcaaagctttttctttcaattctttgattttctgattgagttcttgctcttttttaattcgcaagtcatttttttctttagttcgagttaaaatgttttgcttttcttgttcatcgaatgcactatacttatcaataagttcttgagttttttcgagttcctttttatttcttttttctatttcagctataaggttattagataaatccgtttcaattttcaaaagtttttttgctttgtcttctgatatctgacccgagtttaaacgtactttttccatgattctgctattttcttcagaataatgcacatatttttctaaagctttttctgtttcttttgaaacacctttccctaacacttttacagtatcagacgcttttttagaagctgtgcccatggtttgcataaatcctttaaacttgttgactcctactttgagaaggtcatcgtcgcttaatgatttataaccatctttcatatcttttgaaaacttttctttgaagcttttgccgatacttccaagatagtttttaaactctcctagctttctaacagcgccgccaataattttaccaccaaaaaactttatagtttctcctaaaccgttaataccgtttctgaaccattccacacgatcatatgcggttttaaaaactttatacgcaattgtaatagcagttattgtagcacctataggtcctgttaaaaaccttaaggctacacccgcaaatcttgcgcctccacttactgcaaataaagattttgcagctaatcctaaaccgtttttcaaaagtttgaacggtaaaattgctagctttgcagaatttttcaaaacatttataggttttaaattaaacatcatagctccggctaaccctttaaagccttttgacgtttttcctgttgtagaaccaagaaataatgtttgaagacctaaagatttcattgcttttgaattagtatttgaaaggattgtattttcagcaatacgtctatttaatgacgcatatcctttagcagcacttccaactgtacgtattaataaccctccagcaagaactgcaggtccaattgctgcaccaaaaagtgctaatcctactgaagcttttctaacccaaccagggagatgtgtaaatccatcaactaattttgttaaaccttccgctcctgctctaatcataggcgttaaatctttaccgacttcgattgctaatgattcaaaagcgccacctaattgttccagagcgcctttgagattatctttcatcaaatctgctgcttttttactttcgccattggaattctttaaggatttactatagctattaattttatctggtcccgcttcaatcaaggctaaaaatccacttgctgcttcagtaccaactattgtagccactgtagctagtttttgttctctcgtcatgcctttcatattatcttggaactgtctaatcaattcacccatgccaacaaattgacctttagcatcagacaaatgaatacctaattttttcatttccttagctgtatttttacttggattagctagcctgataaatgaagctcttagggcagtacctgcttgagaaccctctaaacctgagttagataaaacttcaattgctgcggaagtgtcctctattgaaactcctaatgcttttgcaggagtaccagcatacttcaatgcatctcccatgtactgaatatctgcagcactatcatttgctgatctcgcaagtaaatcagcaacatgatttgcatcagatgcttttaaaccgaaagagttaatcgctgaagccattacagttgcagttgtagccatttctgcaccacttgcttctgctgcactgataacacctggcatagcctccattgtttgtttggcattaaagcctaaagctgccaattcttccatacctttagcaacttcgttagcacttttactggttttagctcctaagtcaactgcttgattagacatgcttttcaagtctttactgcttgcttgcgcaatcgctccaactcgagacatttggccttcaaagtctgcacttgtttttaatgctgcacctaaccctaaagtaattggtgtagatacgcccatcgtcattgtacgtcccagggaagtcattttgtctccaatagaactaaatttctttgacatgacatccgcttgacttgcaagtttaccgaaatgactttgagctatcatttgttctttgttaaaagtcttcatttcggatgaagctttatctattgaacgctccaaattatttaaagcagctttttctttattaacagctgtttcagcttttgcgacattagcgctatgattcttaatagtattgtttaaatcattaaattctttttctgtttgctttaatttagtattagttttagcgtaagaactttcaattttatcatttgattttgaaagattgtcattttgcacttttagtttttgaacttgattgccttcttgtttatattgttcaacaagtgctttatgcttagcggactgcttctgtactgcgtcacttgctctttttagttgtgcagtagtagcttggttactattcttaagcttttgttctgcatctctcaactgtttaagtttttgatacgcatcttgtttacgttgatttgtacgtttatattgattttcagcttttttaagttctgtattcgatgattttaaggcttctttagatttatcaagagctaatttttcttttttattggcttctactaactttaaatatgctttctcaacatcttttacactggatttagctttttggtaattagcgttaacttgtttaagctcatcttctacttgagaatacatctttttttgaactttaagcctatcatttaaccccttaattctcgcctgatatttttccattgatttttcagacttatcaaatgctgacagattagctttcatttcactattaacaacacctaattgtcgctttaaacctttcatgcattcttggacacctaaatggtctaatttcagctccaaggtcatgccttctactttttcattcatattaacctcctttctagcttccaaaaagttttcttaaatccgtacctgtaatgactttttgttcactttgtttttcttcagtctcttctttattctcttcattaagtatttctaaaagttttacatacggctgttttctgacttcagttaatgtccacccatactgctccatacagaaacgttgtattttcttaatgttcgataaaatgtcttttattgagattgttcttctgtctttcccatctcttctggttcagtttctgaatcttcttcatcttcaccattgatttctcgaaatatatcttgtaaggcttttgtataagttttagtactcatcttgttcagaacatcttcttcagtcaatccttcatctttaaataaatctactaataactgtcgctctttttgtctcatttttgttgcgttaggtgcttcttttttattctcttgatttactaattctaaatactcatagcatttttctgcttcgcccattgttacatcttcttttgtatagctctctgtttttcctgttttacgatctttaatttcaaatttaatcattgtattagctccttttattcaaataaaaaagacgcagatatactgcgccttaaatccctatccgtttgttactgtcactgaaatttgtcctgacttatcgcttccatcagtagacatagcagtgattactgaagtaccttcagctacaccgtgaattgctcctgtattttcatctacagtaacaaattctggatgttcacttgtatatttcaatattttattcgttgctgtgcttggtgcaatgtttggctcaacattgtcatcggtatttaccataattgatttagtttctggtgtaaatgatacgcctgagactagaattggattggttttgaattgaggtacatcaactttactagattctttaccattttcttcccatgccacttggtaagtaccttttggataagttgtatccgcttctaaattagataaagttactgacactttgccttcaccttgttcagaagctacgacgtcgtctcctttataaacctttaaagttttagtcataaattattctcctttgatttattttgaaagcccctattctgctgaaactgttgcagattttgaattaactgctacttcaacattttggggattagctgggtaacgaacctgcagaatcctctgaatgatcttcactgtccgtgtatccaacgaatacttttttgaagaattctgcttctccttctttaccttcatgataaccgtatacaataccttgtgacgttccatcaacatcaacttttctattcatccagtcacctgttaattttgtaggttctggggcttctgctttttcacctcgtgttttaaattcaattgaatctaaactaaaagtacctttaagtaaggctacatataccggctgacctgttaaaccatcttccgattcgccaattactgttacatacggtgctcttgtattctctcctacccaagatgtaccatttttatctttagtacgtccaataactgtgtttaaatcatcacttggaatattgaaaatactcatgtcagacttaacttcattagtaccttgttttttcatccatacacgtttgttagatgcaaacatatctactaaatctggtgctaaacctgtgatatttaggtcaactgtaccacctttttcatcttcccatgtcatgcgtttaactacttttgttgcttctgggttaaaaactccaacgtataatcttttaaaacctactttataagaaccttgtccttctgccattgcttatttcctccttaaaaattaaaaagcacacctattcgatgcgctgatttttataatatatatttttgggtatgccttgatatcgtctcgacatcacataacgtttagtttcttcaaaataagcatctaactgactagatgcttgaattaaattttgttgatataacaggtatcttattcgttttgttatatcaattgttttctgattatttgaagattctacatctatttgaattaagtattcttcactgagatatttatcagacataaagtctgaaggcaaatcataaacaggtgtaataacaacaaagggtttggaagtttcagcgttttcagtgactttgtaatagtatattctagaatttatatgtgttttgagctctgcatcagataataaaattccttttatggtgtttaatatattcatttatctggccaactccttttttataatttctctatacttacgttcgctagcagctaatgtttttgcaataactccaaaacctcttggtgtatatttttttccatctcttgtataaccatgttcattcaagtgaataatgtttttgcgattcatagggcctacccattcaattaaaacagccctttcttgactgccaacttttgtataaggcttagatttagtcatttcttctatactggcacccgtatctttaaagctctcgaactctttctttaaagcctttataaaaaattcagatgcttcatttaaagctttatcactcttagcctgcattgcttgtttaccgtataccgattctaatttattcaacacttcaggtatccctttaatttctacactcatttttctgataaaaccactgtattatagccaatatctggtgtatcaattcttatttctacaatgttgaataatttatcggaatataatgcactgtcaattttaactaagtgatttgtttgtggtagatattcagttttagaagacctgacaattatggttaatcctgattttgattcagtcgcttttaaaatttctctatctttcatagaaggattataaattttacaaaagcaactatacaatttcattttttcctcttcatctggatatggtcctttgtttatatattgaaaaaaatacgcgcgatctttaaattcattaaattccatttaaaaatcacctaccacttttttaatttcaaaatcattttttgcaatcctttttcattaaacaccttgcttctagattggtcatttgagtatccacgactttcataatctcttgcaatgatatatttaatcgctgtacaaaaaagcgggtattccaagtcatctttgtcataatctggaaccccacttaatagtaattcagacttagccgattgaatgagaccttcaattaaatcattttcgaaattatagtcaattctcaaccacaatttaatttcttctaaactcatttcatcacccctattcggctgatattacagctgatttagccttagctgttacattaaccttttggggcttagctgggtaatggacctgtattttcttttgcttttgcaattctgaatgcactgtctaatgtacgttgctgatcataccatgctgttaatacaaacaaatattcgccttttttaacatctttatcagtgtcataagttgttccatcatagttaattccaaaataattgaaatctcccacaataggtttaactgctgcatctgtaaatactactggtttgccaaatactttttctgctggtgtgtcaaagaaatttgttgttccatttgaaagaacactaataattttgacataatctgcatatcgcatataaattgttgcgttatcacgataatcttcatgtaaatctgctaaagcgttaataatagcatcatacatgtctgctccctcaacttctttaacagatccattataaaatgacatgtgttctaatccagatttaggacttactgctaaggcatctttacgctctttagctgctaatcctgattgtagtgcgttttcaacccagtttactaaatctacatctgatccatgaattacagtatctgaaattgcagcaaatactttgaatttattagtagtgaacttgactgtatcaccttttgcttttaattcttttgctgtttctacgtctgtaatgaaatcatcatcgtctaaagtgtatgaaactcttggaatctctaaacctttaatgttagttagacgagctttttcacgtaattggtttttagcaaatggttctgaaacaatttctttagaaagtgtttttggtaagagcttatctccacctgaatcatttcctgttggtaaagcgtgtaataaacgttgtgcctccattgaaggtttttcaaattcatttggtaaaatcgcgtgacgataaaactctgccttagctttaaccatcttctcattatcacttaaagattgataagcttctcctttatctttaactttcgctttttctttctcttcaatgtcttgcacttgtctttcaacaatgttaaatctttgttgtaaacctgctttttctgtttctagttgtttgatgtcttccatatcaatatttggatctgttgctttctgactcaattcatcatttttattttttaattgttgtccaatcatacctaaggattgttttaattcatataatgtcggcatttcatttcctcctaataattcattgtcatttttaaaatttcgcattcgcgtttaattttttctcttttttctttttcttctagtgacatactttctttaggtgtttcaaccaattcagatgtatctacatcatcaattttagtgattttgtctacatctttctttaaatcttctgggacgttctcgaaacgcttatattgctctttagagatactagcagctatttcattagctcctaaaatttcatctatcaagccgaaagacaaggcttcttctgcagtaagccaagtttctgcatctaacatctgttttaagtgttcttgatctaaatcttttgctttatctaaataagctgaattactaacagcatctgttttttcaagtaaatccgctgtctttcttaattcttctgcattacctacagtcataacccatgaattatgaatcattaaaaaactatttttgtgcataaaaatagtgtcaccactcatagcgataacactagcaattgatgccgctaaggcatcgacatagatattaatttttgcaggatgcatttttagcatattgtatattgcatgcccttcaaatacactgcctccagatgaatttatatgaacatctatttcactgatgtctcctagttcatctagtttatttttgaaatctgtagcagttacatcactttcaaaccatttatcacttacaatatcaccataaataaatatttcacctttactttttgattttcttttcatttgaaaatacttagctttcattgacatttttatcaccacctttcaaagattttcttaattcaagtggcgtgtcaattgggtataaatcaccgcttattagcggcttatctccaccttcaactggtggtaaatcttcccactctctaatgtcatttatagtgtagtaaccactacgaactgctttaaagtacacttctgcttgtgttgcactatcagcccttaaataagatttaacgttaaatttaaaatacctatttttttctctgtctgttttagtaagtagtttccgattaaattcttcttcatactgtttgacgattggcaataaggtatgctgcaagtaaaatctgtttaactcttcatttttcgcgaaatttgtatttgatcttgcatttaagaatactgagggcaattgaaaaacgttagctactctttctcttgttaaattctcgcttgccactatatcttcagagacatattttttaggtaacggttcgatttcaacaccaggctcttggaataatattccaccgttttcttcatagtactgtttgaaatcttctaacacttgctgccttttttctttacctacattggaaccatatttaagcatgaaagaatcaggtttttgcatttctgtaagattaaaggttcttactgcattatcaaaatcagttgtattcttcaacacatcaatcggactaatgccttgcaccatattagatgccacgatgtgtttaaaatgcaacatgtccatattatgaacaatcaatttatttccagttgcagcatgaatggaataataaagttcacgtgattggttttcaattaacatttcaacaacatctggatttaataagaaaagctttgatggttgatgatagatgtctcgttcaattagcacatatgcattacctttttcatttctgattgtttcaatttgattaataaaatcaaaactgctcagagaattattcggtgacactgtaagtaaatcagatacttctgtattaactactttataatcttcatacattttcaagggcaaactagccatcgaattagataactttgtaatagctgaaaatatcgtttcattagtttcaagcgtattattgattacaccccaaaaagatttatttttccatgggctaaagtcataaagcttagaagctgactgatcaatccaattgtctatcaattttttctttatgcgtgtgacaatattctcttttgcgataacattcacctccttaacgcattatatctttaatactaataaattctatgtttccttcacccttgtcagaaacaactttattcataatatctgtatatgtgtttaaaaatgctgcaaagccatctattttacgatatctgctttgcttagacggcaaccagtttccgtttctgtctagtttcaactgaacattattgatataccatttcattaaaggattattattaaatattattttcccatctaaaaacatttcttttaaatccttcaatgcagggctcaaggtcaaagctccttgtcttgtttcttccgtttcaaacccgtaattttttaactcttgatttagtttgaatgcgttcgctctatcataagtaattttttctactacataatgctcattcatcttaattatccaatttaaaacatcttggtagtcaatataaggcttatcttgcactgttaataagccatcttcttcccattctctatagggtattttttcgttagaatattcaactttgtgcttaggaatccatgaatgcgataaaactgcaactttaccattatctaacgcaaaagtagcacacgcggctgtaaagtcctctgtttctgataaatcataaccaatcgtgcatggtctgccttccagctcttctaaagaaacaatttcattatttttttggagtgttgggtaatcaataaaactcatctcgtcattattagcaaagatattaaaccttttggttataaaatctccacgttcagctggtgttctcttagctttttcccactcttctttcatctcatctaaatttatagagacacctaagttgggatttgcttttatccagttcgacgaatcattaatatcatcgtcatcatccaaagatgctaaataataaaaagttctttcgtcttctatgatttgatctaaggtgtctcttcccgcttctaccatatcaacaagtggaccatctaattgataccctgctgtcgtaatgtagatgagaagaggttgtaaccttgcagctcttgagttttttataactgaaatcaatttatagtctttaaattcatgaatttcatcaaaaatccccatgtgtgtattcaatccatctaacttatcgctatctgatgcttggggcataatttttgatatcgttgcgtcataatggatttcatctcttaatgttctgaaatttttatcaagctttgggctagcttttatcatcgccttagattcatcgaataatattctagcttgtttcattacgtttgctaaaagatggatttcagcgccgttttctccatcttgagaaacagcatagttagcaacaccagatatagtagttgttttaccattttttcgccccataaatatcaaagcttctttaaacctgcgcagttttgtttctttatgaacccaaccaaacaaactgccaataataaaatgttgccatggttgtaatacaagttgacgtttagatcctttggaaggtttacaaaacttttctatgaatcgaataggacggtgcgctaattcttcatcaaatacccatttacctccattttctagatatctaaggtgtctctcacattcttttttaacatatttgcttgtttttattttcccttgagtgacttgctctgcataccatgttgttaatagttttggtgaaggttcatttaaaactttaatagtcaccgaatccaccttcttcttgaactatcttttttctttgtgctgcagttaaacccatagacttgagtaagttatttagtgtttgaactgtttttgtcagttctatgcttaatggattcttaacaatattgctcgcaccagccttgtttgtatgctctatcatcaaatcactatttttaagttcatctcttaaccgacaataaaattcatacgtttctatatacaaattaattaatatgtcatcagattttttataatcctctatatattctttcagctgtttttttgttaatttcatataaagaccccctttcataaaagtttatccgcgttgcaagcgaagggcccccgccggtacccggcgaaaaaacattttaagccaatgggcagggggctataaaattttatttaaatgtttttttatttaaatttttagaactctaattttcttaagattacttttgtcattaccatttgcatgaattttgttatgacagccataacaaactgacattagattatctaattctaaagctttgttaaaatcttcatcaacataaataatgtgatgcactatgtttgcatctgttacaatatcttcgcgtaaacacatttgacaaagatgattatctctatctaatgctatctcccttaacttcttccatgcttttgaatgatagaaccaatcgtattgatatgacttacgaccatgcttataaatgttattgtgcttggtcatctcttacacctctttgattgcataacaaaagacacaccgcatagcgatgtgcctcgtgtacttgtgtcgtataacttttagataactttatacatctttccgatactatcatattactacagatttgtaggccttttgcacaatctttgcacaatgttatttgatacctgcatgatacgctaccgctttaacaaagttctttcgtatagtagtaacagtattacgatgcatatggcattcatgtcctatctgttccatctttaacttcttttctttattccaatacttgagccttattactttcttatgatcttcaggcaactttaagtattcactctcaactgcttcgaccatttcttcaaggtttcgtaacatcttattagttaataatctagttgccattagttcagttgttctaactggttcgcctttttgtaatggtccatatacaatattggaatcttgttccttcgttggattaagtatttccaacctcaatctttttatttctttcttgttctcatttaaattatatatttctgattcaatatatttaaatgtgcctggcttgatatcatatattgtgttccccatgttagacctccattacttatgcttagctattcttgctttaatagctttcattaattcttcttgcgttagttctttattttgtaaagctttatatactctttgatctattgtgttatcggtcatgatatgatgaataatagtcgtatgattttgtccttgtctgtataatctagcatttgcttgttggtataattccaaggaccatgtaagtccaaaccaaacaataatgtgcccaccttgttgtaagtttaatccatgtcctgcacttgctggatgtgctataagcaacttaatgtctccactgttccaacgttctttatagtttgaatcgtctaatgtggttgcttccttaaacctttgaagtattctttctttatcgtgtttgaagttataaaacaatagtattggttggccttgagactcctctataatttcctctaacttatctaacttcttatcatgtataagtcttacatcttcctcatctgtataaactgcgccgttagatagttgaagtagtttctgacttaatgatgccccattttgagctacaactgttccttcttcttccgattctaaaatatagtttttttctaattcttcatatacttttctttctttttctgataagactactgtttgtttagtatcaactctgtcaggcatatccagataatctttcgctttcatgcttaaacatatatcttctatttgtttatatatcttttcttcagatccgtctcttagctcccacttaaaaatatgttcgctaacttgatgagttggtttaaagtacctttctcgataacgactgaatgaagactcaagtctttcacctctgtctatcaaataaacttgagcccataaatcctgtaaactatttggactaggtgttcctgttaatcctataaatctattaatgagtggtaatttctttttaatagatttaaacctttgactcttaggacttttaaatgtagacagttcatcaatcacaaccatgtcaaatggccattcttttttatattgatcacataaccatttagtattttctttattggttacatagatatcagcctctgtgtttaatgcatcatttctttctttaggtgttcctaaaactaaagacactttcagatgatttaaatggttccacttatcaacttcatcaacccatgtatctttagcaacttgtttaggtgctataactaacatttttttagtgtctaacaactgcaattcactaaatgctgtaagtgttgatactgttttccctagacccatatctaaaaacagaccgtatttctcattatctatcactttatctattgcatacttttgatagctatgtggtttgaagtcaatcgccaaatgttccacctaccattctgataaaagtatttacttgttctttattccataacacatatactttatgatctctattttcaaattgtctatgcacatatttttgtaaaggatgcaactttcctttttcttgcttcatttctacaaaatatgtttttccttctggcataataataattctatctggcacacctcttgttccaggtgcaacccattttaaacataaaccgtttagctttgatatctctttcactaaatatttttctaatgtcgattctttcatatattcaccttgtatacaaaatttatatttgtgttccgatgttgcatcaattcttgccaaacttttaaaaatagctgttagagggttacccctatacctctttactccctaacactactttttaaactttatagtgaatttgatgcaacattggaaacaaacagggttgaaccttacagcgagaagggaaagaggtgttgtatcatttgttgcatcaatgttgcatcactaaaaatgatgcaacacctacgattactttttacactcacgtgttgcatcactcaaaaaatgatgcaacatctgatacaacactctaaaatgtatatttattcaatatttattatattaaatcttctaaactttcatctcttacataagctatctgtacaccataatcttttccaaatcgaattttcccacttttattaccatcatatacagaccaattgtctaattgtcttaagatgtttgaaatctttctaatttccatagatcctctactatctcccttatctttaccaaaacattcaacaaacacttcaagcgcacagaccttatttctttcaacgtaatctacatttcctgttggtaacatatcaacatcaccttgataaaatcgtcttcgttcaaagatagttaagtcatcccaattgctaggaattggtgtgttaagatattcatcaataatgcctgtatatggagattcctcagtatgtttgctttgtattgaacgcatttcttcttctagttcagggttgaggaataactcttctccttgttcataataatatttagcttctgcccaaatttggtcgatctcttctttggttagtttagaccagttcacttcaactctctctggatttacagtcattggccaaaaacgtcttccaccagtttcatctcttaagaaatcaactttattagttgtaccaatgaaaatacattgccttggaaaatcttcaatataatgtccataagcaacacgaaaccggtcaacttgtttagatatgaaatgcttaatagcttcaacttcagcttttcttgtagctgcaagttctgccatttccattagccaaacgccttgtaaggcctcataggcttctttacctgtaacagaaactaaactgtcagaaaaccatgcaccacctaatttttttagcaaagcagatttacctacaccttgaggaccataaagtgtaagcatatagtcaaatttacatccaggctccattactcgagcaattccagcagtcaatgcttttttggtagttgttctattcacttcagtatcttcaacacctaagtatttgataaataacttttcaagacgtttatgtccatcccacgatattttatttagataatcccttactggatgataagcattttgcattgctacgcttataatggcatcttttgttttacctgaatggtgtatgtcataaatcttttcgatataacttcttaaactgctatcatcaccgtcttgccattgacgtgtcttaaaattagtattccatggcactttccctaagcattcaatttgttttgtaaattcattaaatgctatttttccttttaaatttggatcattacgcaatataatttctatatttgggatactagctttgaaagtacctttcgaagtaatttctaacgtctcagaccatgcatcatcgctatttactatttcatcgaaatcctgcattgcatcagacattttgtcgttaattaattgctttttaacaacttcatcattttgcgctctttgctgcattgctttataactaggtagtcgattaaccggagtatctgttttagcgtcttcatcttgagcaccatataagtgtatgcgtactaaatcaaaactgttcacaagcataccgctaacgggatccgtattatgatgagaataggcaaacttgttattttcgtataacaccaatccacctgcagttgaaccttcatgataggtataacggttagtagaatgtttttcgtataagtcaggaataaaagttgatatagcttcttctatcgtataggctctacaaaatgcgccaacaattcccggcttttcttctgggtcaccttgcttatctgctaatcttttagtcttactctcttcctttgaagacgttggccattctaatgtgtcagtccaatcaacatattcatttaatattttatctggatctaacaaaggtaaatcttcataggtaaagaaaaattctgcatcattgctagttgaaggccaatacattaacctatgtggttgataagttgtatcatcgaagtaatccatgccaacgatatctgcgactttacgcccaatagcttcatactcatctgcatttacatttcgttttaaaggaatcactaaacgcagtcttggacttatctctctatgcttatgtgttgaatataaacaatatgcaaaatcataaaacatagataatatgtcagtcatatcttgagcagcataatcgatatcaagtgttagcattgaacgattcatgacttgaccagcacgtcgtttgccttcttttaaatatccaccgacaaatccgccaacatcttttatatctgcttgttcagacttagacattttattgtactcagttaaatcttctttagttctaactgtttgtgctagcttctgcataaagtcagaccaagccatattgtgattagtccaatatgtggataaacgactagcagcataagaatatgagacatcacgatcatatttaattgtttctatttgagtgactttgtctaacatattcggctcctttcttgtataattaatttaataaaattaaagaggtgacaaattttgaaaactttacgcgaaatcatttatgataaatacgaaaatgaaaacttgagaactttaattttattgcactcaggaaaagcctttcccgtaactaatataatctcagaaaattcaaccttcttaattatcaagacttcaaagacaatttcacataaattagttttaatttacaaaaacgaaataaaaaatatccgcttcttttaatcctggagagggctttagccccctctttagcttttgaatctttttctaattcgttcaacttcattttcataatcttctaaaccttcaacaccattattttttactaactgcttgaaaagataagaattcatatactccaatgcttctatggttttcatcttatgagaaatgctacttaacaagatcaataaaaatatagctaaaacgattgaaatgacaatccacatatttacaacacctccagtgctattgctaaacacattaatataattaattcaaaaatgataatagctattaccatgaaacttcagctctgattttttcgtaatcactcggcgcctctacatcatcattagccgtcatcataatatacacttgctcagttacatacttacctaactcatacattgctagtaagaataatagtcttagtatttgtttaatcattgtttatctaccttctttacttcgtataagaccggatataaatttaaaaagtgtattctataaccgattgttttaacttctaccttatcgcctacttttaacctagcttgtatatctgcgctatcaaatttctttttgaataataagtcggaattttcaatgacttgtttgttgtctaatacaatatagaacttgtcttctttatcttgtctcttgttatatttatctgtaatagttccttgatgtaattctttgtgttggtaactagccactgtatagataggcaatgtgataacaagtagcaatgcgaatataccgaataatgacagtattccaacaataaagatgtcgaacccatccatatttttaagttttttaatcatcattgtcatctccagtatcaattaaactaggcatcattcttaacatagcccttaattcatattcattcatattagccatcgtaggactgtaaaattcactgtctttatctttaatttctttaataaaatcatcttcaatcttagccttttcttcaggtgctttatttttatattttttgattatttcagtgtactttttcgggaatttcattttaggtatgttaatcatcgtttgcctccttaataaatgtaaatgattcaatctcatctcttttaacccatacttcattgttgaacacatctttgaccggaagaaaatcctcaatcactagattcataacaagattaatataatcgtcagaagctagatctgttgttgtgtaataaactctatctgaaatagttttaattttaacctccgtcatttcccacactcccttatattttcaaataactgacccactttaataactgcatctcttttaacttgtgcctcgtatttgcgctcagcttcttctttactctctgcctcaacaactgtaaacctttgattgcttttagctttagttatgtgtgtatgcttgcgtcctgttgaatctttgaatgttgtgactaagtattgcgtcacttccccaaaacctccttgactcgatctaagatgtctttacacgtatccttttcctgcgtctgctgttccatcttgtctttcatgattccttttcattttctttttgtatgcgtcaatgagctggtcgatagaatataagttgaaagctatgtctatcgctattacaattgccaattggtcaggataaaattctttgaatattatctgtggtgtgctaacaactgcgtcttgagcaaattctttatctttaaaattaaacatgttgtgaaattcactatttttaaaacttgattcaatcgcttcttttatctcttctgatgacactcctacttgattcgcaatactcaatccaaacgccaacatgtccgctaattcatctaactgaacatctaacggcttacctggtttcttcttccagttcttaaacgtttccaatgtattaaaccattcaaagaattcaactacatatgctattttgctatctcgtaagttcagcgttggtattctatcgtcgaactccttttgtatttgtaataactcttgtaactgatcaattgttaatgtattagtcattttcctgatcctcctcatatttatagaccacttgccccgtcataatccctactgcttcatcaagaccaatatcttctttgagtgcatcttgcatagcattaggtaaaccttcaagtatttcatcaaacgcttgcgctttcttatacacgtcttcaatctcttttagtaatccctctgtgtcattgccgttatacgcactagcactgataattgattgttcaatttgttcgcggttattcatcatttccatctcctctaaaataaagttagttgcttctgttcctcgtattccaaaccatgttgctttatatatatttcgagctcttcagcagtatcaaatgtctttttaacgctttgccaacctggcacgatatgcccatgaaagtaatacgtgccatttactacatgagtatgtgccactcgttcgttatcctgatacagatatcttttagagccgaaaaattggtttaagcgttctttacgtgcgctatctgtcatggtcgtcactccttttaacaattaggcagtccaaacgacatgcattcgtaatatagttcttcattccttatgcttgtcttatagttctcaatcacattgctaacttctttatgactcattgctttaacttgttcgtctgtatatttttcgcagtcttctaattccagttgctcctgtaatgacattacgtaatcaacttgtttttgcgttgccatcgttacccctcccacaagtcaaacactctatcgacgtaaaacttcgcctttgctaaatcctcatgaccattctttaacggtgctctagacaagtatttgattgcattacctattgcgaatgctaattgtggtggatactgtgccgtaacttgttcgatgaaatctataatttcaatgtcgccgtatgtgtaatgcgcaggttgtttaacattgtcttgtgtttcattcatatctacttttctgttactgattatgctcattatgcttcactccatttcttgaacatttggttataagtgacatcgaaccagtacggatcacgtgaatgtttttgaggcgttccatcataaagccatggtctcaatcttctctttctttcttcttcatattccgctctcacatttcgttggtataggttcaaaatcgctttttttctgattttttctctctctttttcttcatcttttatttgactcttcatatattcaacttcatctttagattttgagtcttttcttccacacaataattcatcgccgcgcattttatgtttgtatctgtatctaagaagttctggagatatatgatatttttctgaaacttctctcaatgtcattagttttcctttgatacgcactcttataacttttcttctagccatcattccacctctaaatctaaaaccttgatatttataacgttatattttaatagttcacctggattattaaataaatagtccgccaaattctctttttctttatcaatctgattgtaattaacactttcgacttctgtaggaattctaatgtcaacagaagcattgatataagcttgatgttgcattcaatcacactcctaatccttcatataaaacggagaagtaaatccgtcactattcaaattcaatccttttgcccaatcgacaggcttattcatgatagtttcgatttccttaagtccatttgaacctctaggtatttctacaattacttcatcatggacatgtccaactattttaaaacctgatgcttcaagcctagctatagaaatcgcaagtaaatcccttgcagttgcttgaacaatattctcgactaacttcccaccatacgtttttaactttgaccatttacggttaagatctaagcccataaattcaacaacttgactaccccaactattttcaccaactgaagcttttggataagctaaagctcttccactaggcagttcaatcattagaaaaccttttttcatataaaatctaactccatgcgtatgatgcgtctttcgggatttcacagtattaattgcagcctcttggcaagccttccaaaaattaactatgttaggatttgcgttacgccaactatcaactaaaccttgtaattcattttcttcaatgcccatttccaatgcgcccatcgcttttaaagctccagcgccaccttgataacctaaagctaattcggacacttttcccttttgtctgagagggtcgcctttagttatgctttctaccgggacattaaacatttgagaagccgatgcttcatatatctttccgtgtgtgttgaacacatctaaacgccattgttcttttgcataccatgctatgactcttgcctctattgcagaaaaatcacttactgctagttcattaccttcttcagcagtaaatgtcgtcctaactaattgacttaataagtcttgaggatgaacattgagtaataaatctaaatcgtcaaaacgttgttctttaataagatctcttgctatttctaattcagtatctgaaatataatgctttgttaaattctgaagttgtacacctctacctgcccatcttccagtaccggcaccgtaaaattgaaacagacctcttacccgttcatcactgcacatcatgtcatgcattttgttgtattttttcacactggttttagacatttgcaatctaatttctagcatttttttagcttttcctgttgcttcttttaagtactcctgaaccgttttcttttgtaaattaggtatatctaatccttggtcatcctttaaccaagccaataattgtgtaggactattaggattttctaaacctgttatatgtttagcttgattaagcaattcttctttactctgcttatcgagcacattagctcctaacatcaatgatttagaaagcttaatacctctgtcgtttatatgttggtcaaaaacccaatatgcttgttcaattgcagttactggaaagtctttaattttatgagcaatcgtcatttctacttctacatctcgaatacagtaatctataaattgttgccatttttcaagatcatgttcaggcaagtttcttgttcttcctccattaacttttgttggtttacaaggtatagagaaataacgaattaaatttttacctgctttatctttttggttttgtagtcttaaaacttctccaactttatcaagcgaagcaggtaagccaatacgcattgaattaaccattgtgcaaatccattcttcaggtggcatctgtttattaaaatgtttagcaagacaagttctttcgaaattagcattgaatgcatacttttttacagcaggatcaaaaagagcaattttaaacgtctcaaaatcagcgtggaaaggctcattatctactttagtcatgtcaatcgcactaatcgctccaccatctattgaataagctataattaaaatttcgaaatcttcagcttctgtgtatttataggcaccacatttcgaaatatcattactgctatatgtttcaatatctatattcataaatctcaaattcttgacacctcaatttctttaaaattaaagtggggctaaaaccccacctattgacttataagaaatcctcatcatcagtgtctaattcatcgaaatcatcttctgctgcacttgcaccgccaagaggttcgcctttttctacaagttgaatgttgttcaatccaactgcgatacccttattaccatttgtgttgaaaggaaatagattaattgaagctctaatataatcaccacttacaacagttccagaatccgttaatctaattttgttttggtcaataataccaggtgcttgtttgcttgatgcgttaataaaataagcgtcttgataattgacatcatcttctctttcagtatctccatcacgtaatggaagtttcagatttgcaggaactttgcctccaaacttactaacttttccttcttctttagcagcttctatagcttgttcaatggcttttatcgtacttgtatctgatttaggaatgattaaactgattgaatactttgattcttgcccttcttgcatactgtgaggttcaaaaatatgtgcatatgatgctcttacttttcctgtaatcactttagttttatttaatacttttgctttcatgtttatataccgtccttttaaatttttatagtttgtcaaaatcatcttcagcagattgctttatagctggtcgtttatccgactcggtagcaagtgttaatttaccttgcggcttttctataaaaccctctgtaattttagaaaatgcttttttaccaattaatttttctaaattcgtaatgctaagtaacttggtttctgtaatatcttcaggtttataacccgcttcaactaacttttcaagcattgcttttgtatcagttatcattcttcgtgaacgaccttctacaagcttccaaccaggatagtttttatcattttctttcgcttgatttagtgcatattgttctacttcatcagcccattttttgatatcaggcagtttatataaaagttctgcaatctcttcatcacttaacaaatgtggtggcttttgaggcacattttgcatgtattctgcacgtgttctacatgaatgatttatcttacagaatctacaatgactacctgctttaaactctcctccaccgttataagcaagtctggctaatggtttaacaaaatcggctccccattgaagtaatcttgatattggtaactcttcagtagaaaagttatctattcgaggttgtatgatagtcatgcgaattgtatgaatgtcatacattaaactaagcagttcatatgcgcccaagccatataatctaagttgaggattatctatagctgaaacttcaatgcctttaccatatttaaggtcaataatttcaagtacaccacctgaaaatataatgacatcaccagttccaaaagattcagggacgtatttacctaaatctaattttgtttcaaataaagctattacatcattatccctactcaaagcttcgttatatttttcttctacattagctacatactcttccacatattcacgcaattcttcgctgtaatattgatttctcttataattttgaaaagccttattaaactcaaactgtgttaggccttcatatttaaggctgaaatataactcacttaactcatgggcgaatgtaccttcttcggcaaaaactgtacttttatctgcaataccttcacttgccttaatactcggtgggcagtttagccattgttttgctccacttgcactaagctttgcatgagctctatttgagtgatctagcttcatgcatttattctcgcattcataaaatcaacaattttttcataatgctcttctttgatagtagatagcttatccgcaccaagttcgttaagtttatttctaaattctttcttatcagaagtatctgcttttttaaggaactcttttcctactgataaaacataatctttagttaaatcagcagaagtttccttaacttcttcaattgattccagttgagctgtttcttcttttggcattggtgcttctttaactttctcttgtacaattgatgaatctactgttgatagttcagtgtttaacacacgtaaattgttatttaatagttttaattcttcaaaaatatcttctaatattgccattgattaaatcctcctaccatttcatgactaagttaattagtctgtcctgttcatctgtgttctcttcaatccattcgtttataacgtcacgcattgcatccgtcgcaaaatatagttcgcttaaatctacaacatgaaatgatttaagtggaatattattcatatccttgatttgtatactgataccgtcatgttttttcatcgcagacactttaaattcaaacccgttaaagctgataattttattttttatctcaccaaatttgtaatacattgttttagccctccttgttatcatcaataccgtgaaatttttgtgatttacacatttggagaacattgacaatgtctttataactcttagtgctatccaataaggaagcaagatcgaaagtatgaccaatcacagaacttgaacctgctaaataatctccgtcgataactcctattgatgagaaaagcaaaatatcaaatttactttctcccttaatttctttcgctaattcatacaattctccgcttttttcagataataagtcttttacttcttcctgagtcatgtctttatattttttagtcattgttgacttcctcctcgttttcttcgtcctcctcgttatcttcttcgttttgtaattcataaattttgttttttagttttatattttctttttccaatttttcgttttttctttcttccgcaaaatacttacctctgtaagtatcttcttctttatctttaacagcctttatttcaataagttttctgtactcgttcaatgtgattgttactgtcaattcttgatttgctacaaagttatcttcttcatttctgtatcctgagaaatctttagtgtaataatgttgttcagttttaatattttcagccatagttgactacctccgtatattttgatttaattaagttgtatattttgataaatgtttgtcactgttacttgttgacgcaagtagcagtttttttattcttcataaaagtattctttgtagtatatgaatgttgcgatacttgcgaatcccgcaattgaccatgctgtagtgaagtacagcaatggcataagcacaatcgctaagactgtgaagcacagtactgctattaattagcttttatatgtgtcgctcatttaatatcctcctaataccattttttatgctttctgatcaaatactcttccaatttagaaatattaatcagagtgcctgttggtgaataatcaatgtataaattttctacacctaaattatctttgcggtaatatttcaaccagttgtatactgtacttctacatactccaaacaattgatggatttgtgtaggtgttgcgtataactttttcacaaatttttcttcgcctctatatgtgttttctggtgttggtggtactatgatttttggcatctctatcactcctttcgataaatgttaaagtttgttattattcgctctgtattgaagttctctatctaatgcatagaaaactttgtttatttctaagtagctgtaatcaccttttttaatacttcctaatatttcctttcttagtcgacgttcattttctgttaaagattctactgacgcatgatctcttctgaaaatccttggtatgattatgtctaacccttctgattttttgttcatttgttgttccacctttcgtgtataatgttgttatcaacctaaggaggtgataagtatacataagagattgctcactcaatatttagataaagaaatcgttacttctttagatttacatttaattaatggtgaagttattaaagtacaagaacatataaaagatgctgaaagcaaaactctacacatcattcatccaaaagatagagttgtcagtttagatcatgttttgtatttcgacattaacgttaaaggtgaaaagaataacgatagtccttatccatcttaaaatccatagtgcttatagttatttgctatttgttgacagttatcactggcaagtcctaccttgtcagcttggtaactgtattgattatttacttcatttactaatcgattccattcgtctcttggtatatcttcaagaagtaagagaatcatctttaatttttcttcgttcatttgttgttcctccttttaagttgtttatgtccatttgttacattacctaaaagttataaaaagttatacgaaggtcaaaaaatttagacctttatctggtctacctcaatatcatataactttgctaaagcgtaaactgtaacattacttaaattagtgtcatccttttcccaatgaccaactgtctttgcattgacgcccaatatatctgctacttcttgctgtttcaagtcccttacaagtctccattttcttacggataattgttccggcatgtcgtccacctccctttcacacgtataactttatattactttgtattacttgtcaacagataaagttatatttcttcataaaaagttataaaaagtattgtaaagtaatgtcggttatggtaagttaatattacattaagtaatattaaaggagacaactatggagaataataaagtcagaaaaattttatctgaaaaccttcaagaacttatgaatgataaaaatattgatcagagagaacttgctgaagctattggagtttctcaacctacagtctccaattggattcaacaaactaaatatccacgaattaaaagaattcaacaacttgcagattacttcaatgtaccgaaatcaagaattactgaatcaaaaaaagatatacatcaagaaacaattgctgctcattttgataaggagggattaactgaagaagagattgaagaagtaaatagattcattgaatgggttagaaatagagacaaataaagggtgtttatattgggattatacgaagaactttgcataaataacgaaaaaataaagatagaagaaactgaccagcttccaaatttccaacctggatgctatatgaacggaaaaatttatataaggcgtaatttatcagaagtacgtaaagcagaagtgttatatgagcaacttgcccaccacaagttgacgtatggcaacattttagaccaaacaaaatggattaatagaaaatttgaaaattatgcacgtagacatggttttacttcagctgtaccgctacatgaaattgtagaagctcacaactacggtgttcgtaatttgtacgagttgtcagagtatctgcagttgagtgaatcatacatactagaagctatagaacaatataaaaagatatatggtattggaactcactatggcgagtattctattacgtttgagccgttgagagtttttaaatataaggaaatataaacaaaggagagatacatatgaaaaaagtaatcggactgctactagtaagtacattagctttaacagcttgtggtgaaaaagaaaaaccaaaaaaagaagaaaataaaaagtcacaaacacaaaatcacaaagatagcaaaccaaaaacgcaacaagaaaaaatgaaaaaagttgaagataaaaatccacctaataatagcatacaaaataattcaaacaatcaaaaccaatcacaaaacaatcaacttaataataattcagatccatctaataatactcctgcaaatataaatgaaaacgattcacaaaatactaatttaaatgatgagtatgtcgtttcgcctggctggactaaagatgaacaggctaaagcttttgaagagtacaaaaaaggaaaagaagaggaagcaagagctggtgctagcgcagtaccaggagccaatattaactaataaaacaatataagaaagaagagctaatatggaaacaaataaaacaatcgatttaatgaattatgtggaatttccaaaaagatacacagaggcaaaaggcaaattagttgcacaaccaataactactataaatagcgcaagaagagttgaaaatgaagatatgactgtttgctacattttagatcaggatgatgatgtaatggactttatctttgacagagatataattactgtttactgtcctgaaaacggaactgcgactgatgaatatttttgtgaaattatatttaactcagatgacacatttaccctaaagcgattatctaattacgttaccattaaagatagaagctacccaatgtcaaaaataaatgacgtaaacattacgggcaaagtcgtcagattatttagagattttaaataaacttggctttaattacgattaaaagtacctatatagcgtgacgagaaaaaggattaaaaaaaatcaaaaaacgcctactagtgtagacgttgaatggtggtgagaattttatggtagataaaaacaaaaaacaagaaactactcgtagtaacccattaaacaaaagttttgaaaagtcaggcgccagcgaaaaattaaaaagcactttatcagaaaaagctaagaaaaaagattagtattcattcattaaatataaatccaatttaatttgttgtttaaggtctacaagcgtatgtttaatatacaattcatcgtttgacggtaaatcagatactttgaaatcttgtcgctcaacttctagtaaatcgaaatcgctaccagctgaattataggttttaagttcaccctcttcaatgattctgttttcaaagtcttttataactataaatactggtttaccgttgttattaaacaacttgtctcttttgtctaataagcttatacaatccaatttcataaactttctggttatattaattaaccagataataaatttaacaattaaaggattaaatacaaacactgttaaaacaaaaataaatagaaacaaaatatttgcttttagacctgtaagcaactgaattaaattcaaattttttaaatcaacattattaaaaattataaaactataaaaccatatcaaacatgtttcaatagaaaaaatcaataatacaggagtattgataaccttgtttttttcactaactaaacctatcattgttagatatttatatggtatgtaacctaaaactcctgtaagaagaagcgcccctagaaattgagtcatcttatcacctactttttattttattataacacatttagtacctagtactaaattacgggtagcccgactacccttattattttttaatattttatagaacatacgttcttgcaggaggtataaacatgtggattgaaaaatttaaaaacaaaaataacgaaactaaatacagatactacgagaagtataaagatccatacacagataaatggaagcgcgtaagtgttgtgttgaacaagaatacaaaacaatctcaaaaagaagcaatgtttcgtttagaagaaaaaataaaagaaaaactgaacaacaagtcgtcaagcgaattaaaaactttgacttttcacgcgctattagatgaatggcttgaatatcatataaaaacatcaggttcaaagttgactactcttaataatataaaaataagaattagaaacattaaacgatacagctctgagaacttgcttttaaacaaactagatacaaaatatatgcagatatttattaataaattatcagatatctattctcaaaatcaagtaacccgtcaactcggagatatgaaaggagctattaaatatgcagttaaattttacaattatccaaatgaatatttgttaactaatgtcaaaattcctaaaagaagaaaaacaatagaggatatcgaaaaagatgaatctaaaatgtacaactatttagaaatgaaccaagtcctacagatacgtgatcatatactaaatgataataagttacacaagcgaaatcgcattttaattgccagcatcttagaagtacaggctttaactggtatgcgcataggagaactacaagcactgcaggaaaaagatatagatttattaaacaaaactatcaatataacaggtacaattcaccgcattaaatacgaggaaggattcggatacaaagacactacaaagactataagttcaaaaagaagtatcagcatcaattctagaaccgtagaaatttttaaaaagataatactggaaaacaaaatgttgaaaagatggaattcgagctatgttgacagagggttcatattcacaacaaaaaaagggaatcctttatgtaataatcaaatcgccggtgtgcttaagaaaactacaaaagctttaaatatgaataagaaagttaccacgcacacatttagacatacacacataactttattagtagaaatgaatgtttctttaaaagcaattatgaaaagggtaggacatgtagatgaaaaaacaaccattcgcatatatactcatgtaactgaaaaaatggatagagaactaactcaaaaactcgaaaacattccaagttagcttaaatccgccctttttttgcccttatattttttacaagctttataaaacgcttgagaacactggcgttaaagcttttcttgaaataaacatatcatcataatgtgatggttcaaatatcatttgtacaatcaaaggcttcatgttcttaacaatatcatctaaatggttatctaaaattggtgacactgcttttaaatcattaagaaaaggctcccatttgcctaaagtattatctaattcttctaatttagttttaatataattacaagttacattaggaatcagggacaaaaattctttcttttttacatttaacatttcaattgcatgtcttaaattcttacgtattttgggaattgtattaatcaaatattttattacatcgacaattttcgatgcatattcatcatatataccttgaacatagtctgctatttttttaataccatcatcgatatggtcttttaatattttcatttttcttcctaaataattagaaggtataactagaccctgtaccatattttcgccgctacaattaatttgaaaatttccatctaaaattgttgcatcttgttgtttcataatacttctaatatctgcaatttgcctaccataaatatcattttgattttttatttggtctatattctgtttcactactttcaaatgtttcatcatttcttcagatactccatctctgaagtcgtgatctatatttttgaaaatttctaaaatttcattatctatactatcatacactttttctataaaagattttatacctttaaacaactcattaattctttcttttaatgcatccaatgcaaaatcaggtaataagtgtttaacagcactaatactttctattgtttcatctgcaacttcttcaagtgagtttattttactaattaaagttctttccatttcttctaactgaaataagttaatcttatccttaaatccttctgataattgtttctttctatctgcaaaatttttattttcattttctgagatgttaaaactttcatttaaaaagattacgcattctgctaacataccacttgtttcaccagtaatcagtttactcaacgcatcaagattttctaaattaagtttaattaaagttcctcttccagaacgtgcaatcgaatctcctgtccaaacatttattggaattcgcccatccatatctaatgttatgttaatagtcttttttacttttttccatttttaatttctgtatcttttaccgactttattttgattagtggtacagtatcgtatgtgttatcttttctatttaacttccttttataacctacatggctgtctattaaagtatctaacctgggcacaccatcattaatgttaacgcgttttcctggcatatctttgatgaatggatcttgtaaccatgttaataaatcgttggtactattaaaactaatcatattatcaaagcgtggtctagcaaatttctgccaagcagcataaggaatcattgctgagtcagtagcaacaactttttcattcggatgtttcgctccttgatattttgctcctgcaccgccttccgaattaccgccatccgccacaatggttttgtttttgaagttacttgattccattctatatttttttaaaaaatcactatttgataatctatctgcatcttctaactttattttatattgatttgataattgatctgtttgctttaaataatctgtgctttcattatcattattcattaatttagcattttggagccaatcatctccaaaccccgatgattttaatggattatttggattaattgcctcattagatgttccttgataaattattgtctgttgaccagttggtttacttttatcatctaataactcatatattttaatatcagcagcaccattcaaattactattcttatcatcattataactgtctacttgtttaaacctttttccattaactttaaattctttttttatatcaatattttgataaacccagtaactacttaattctgttaaatccctatcattaattttattcatctttactgtgcaccccatattctattggacgattatcatcataaaaggctttcttagtattaatagtgggtttccctatttgtattgtgattgtagatttatctggtttattttttaaattatataatttatcacttagttcgattacatcatctactgtattgtctttagtaaagtttttcttagtagaaaaaagtgtagcaacagcatctgtatttgcagcgtaattcacttcttttcttgctcgttccattccttctttaaattctttatcattttttcgaatcagtggttcataatactttcgatattcttttaaacttctagaagagtatgtaatataaaaatattcatttttatatccgacattttgcgtcttgttaattgcctcttttgtaaagcctgtatattgatatttcttttcattttctttgaagaatttatataagttatcatacttttctttttgcgctcgatattcaaagccactcagcactgtacccaccatcatactcatatcatcaccattgtcattactgcgcattgatcctttttgatggatggcatctttgtacaaaggtagacttgcattaaatacaatgccatgatcttcacaatgcacataaacttctacaccatcatctttacctacaacatttgtagctttaacttttagtccaaagttatctttaaagaattgttcacctactttttcaaattctttacgatgcttcttcgcaaattcaatcgcatttttttctgcaggcggttgaaagccttggcctacatattttgaagcttccatttcttctggtacagattttgtttctgtttttgtgtctttttttgattcattttccatcgtggaacatccccctaaaattaatgtcgtagctaaaactgatccaatgaattttttcatatgacacctcgaataatttaattaatacaatatatctatattttaccctatttttataatcaaataaataactttatcaaactttatatttttgtataaattagtaatatatttaatagttgatattcgcaaaaaccctaagttctaatccacatacaaaattccccacatcaatcaaaaaacgcatgctataaattagagtctctaatcaataacatgcgttctgaaataactatattcaattttattctggttttggtagtttaataataaatgttgtgcctttccctaattcgcttttaacatctatggaaccaccatgctcttcgataatcattttacaaatgaacaaacctaaaccggtaccttgtttacctcgcgttctcgctgcatcaactttataaaaacgatcaaatacttgttgtaaatgttctggtgcaatgcctgtacctgtatctttaatgtataaaatatcttcgctttcattttcatcacaagtaattgcaatttcatctccaggtttcgtataacgtgatgcattatcaattaagttcgttagtacttggtccatgcgatccatatcataactccaaacacgcttcttacaataattaaaagtcatatttagacctaaatcatcagcttgttggcgatacttaattttcatcttatctagtaacgctgcaataggctgaacttctttatttacggataacccttcagcatccatgcgtgcgacatttaacaattcattaactaaacgatttaaacgtttcgattcatcaaggacaatggcaagcgattcttttatttcatccggttctgtaacaataccatctacaattgattcagtataaccttgaagtaatgatatcggtgtacgtaattcatgtgatacattagcaatgaaatctttcttcatttgatctagattgtgctcattagtcatatcacgaactgtcacaacaacaccacttttacctccctgttcaatcttgtcgatatagcttgtggtcacaacaaagaatcgtgcattcatttctaaatcgcgcatttcagtttgttttgatttaaaagtatcttctatttgtcttaataagaaagctttagcatcttcatcaatattgtccataatatcattcgccatcttattagataagataatttgtcgactctcattaatacctaggacaccttctaccatagagttaattaagctgtctctaatatttttagatgtggataatgcgtcgacatgctcttcgatttctgtactcatctgattaaatgcctgcgataattgaccaatttcatctttcgttgtgacagaaggtttataagagtaatccccttcagatacacgtgtagcttggtctcttaaacgtcttaaaggttttgtaattcttgacgataagaaaaacgcaaagactgttgtaattgttaagaaaataacagccgtaattatggtgataatcgtaatagcattatttgtatcttcgattgatttcaagtctttatatataaagactccactatatttgctatgactattcttctgtgcttttgttggatagcctaacaaaatatatgtttgagatgagcccttttctttaatcgttacatttcgagtaacagatttacctttatcaaacacatcgtcaaaatggtcgttgttgactacttcattcaacatttgctttttaatattagaaagtgaagccgttgattgacgatgtttattatttataatcatcaacccaccaggattttcaattaatgtttgactatattttattgcttcttctttattatgtgattgttcgaccagtgaacttatacgtctagcatcttctcttatggcattttcggtttcttgtgtgaaatagtattgcataaaggtaattaaagcaatacttaataaaattaaaactgtcgtcactattaaaataatagttaaccacagtttaattacgacactatttagccggctcatcattagatttaacctcaaatttatacccaacgccccagactgtttgaatcatatgcgcagcttcactagacacacgatttaacttttctctaagtcgtttaacatgagtatcaactgttcttaaatcaccatagaattcataatgccaaacttcttttaataattgttcacggtcaaatactttatttggtgttttagctaaatatattaataattcgtactctttaggagtcaaattaacttcttgattatcagcaagtacgcgatgtgcatcattatctatttctaaatgtttaaattcaatcacatcacgtgcgtgaggttcgctttgttctacagttgtagattgcgttcttcttagaagtgctttaactcttaagactacttctcttggtgaaaatggtttgacgatataatcatctgcaccagattcaaaaccttcaacacggtttgtttcttcacctttagcagtcaacataataatcggtgtttgtttatgttcacgcaatttagttgccacctggataccatccatttcaggcaacattaaatctagtagtatgcaagcataattattctccattgcaagttcataagcctcttggccattacttgcttcatggatttcaaaagattctctttctaaatacattttaagtaatcttctgattctatcctcatcatctacgataagtatttcgttcgacatacaggtcatacctcccacacatgcttttctttacaaaagtattatatcacaggaaagcgcatacagttattaaaaacctaaaattttgtgaaaaaattctcaaactttgtgataaatacatattttatttaattatttcccatgttctgctaaatgacgcatcacttttacttcatgaggcgtcaatacacgtccttcaccagcattcaaaccgacaacatttaaaggcccatattcaatacgagacagtttcgtcacttgatgaccaaaatgttcgaacattcttctgacttggcgattacgaccttctgtaattgtaatttcaaccaatgttgtgtttttatctttatcttgtttcttaactttcacttcagccggttgcgtcataccatcttctaattcaatacctttttctagcgctttcacttcttctctcattaaataaccttttaatttcgcaacatattttttcttaatttgatatcttggatgtgtcattaaattagtaaattcaccatcatttgtgagtaataacaatccagaagtatcatagtctaaacgaccaacaggataaatacgtgcttctatatctttaaagtaatctgtaaccactgtacgtcctctatcatcagatacacttgttatcacttgagttggtttatggaataaaatgtaaattttgtcttctagttctattttaataccttcaacttcaatcgtatctgatggcttcacttttgttcctaattcagtgacagtcgtaccattcactttcacttttccttcagaaattaaagtttctgccttacgtcttgaagtataaccgctattagctatacgtttttgtaatcgttctaattctttagtcattattttctcctttttgattgactagattactgaaaaaagcatccatttcttcatcgtcttcttcagttgtcggcaaatcttctatattggaaataccaaatacatttaaaaataaatcagtagtaattaactgttggctacgctgttcattaaccactttagcctcaactagtcctttggcaatcaatgtcttaactgcaccatctgaattgatactacgaattaattcaatatcacttcttgataatggctggttataagcaataattgatagtacttccattgctgcttgtgataatttcatttgtgacttttgttcaattaattgttcaatatacgttgccgcttcttttttagtcgttaaaacatacgtcattccaaatcgttgtatcattaatccatgtgatgaataattttcaattaattcaacgagttggtctttcgacatatctaatatttctaatagttgtttttcatctaaaccttcatcgccagctgtaaataaaagcgactctaatataccatgattatccaaaatggtagttcactcctctaataatgttaatatcttcaaaattacgttgctgctcaatattaattattcctgcttttgacatctctaaaatagctaaaaagtgagtgactacttgttcaattggctcagaaaacgtaaacagactaaagaagttaaaatgatctttatctttcaatctcgatgtcacttgttctgtagcttgttgaatggtaaatgtctcttttcggatttcaacagatttaggtgtatttaactcaactctatttttaactctttgataagctacaattaattcagttaaatcaatcgtatgatttggatcccaagattcatctgtttccaaatgagataaatctgtcggtctttttgtaaaataaaaatctctttcttctttcatgtcatttaaaatagcagtatattctttataattttgatattctattaaacgcccaactaaatcttcccgtgggtcatcatcaacatccatatctgatgttgattgtggtaatagcatcttacttttaatcattaagagttctgacgctaatactaggtattcacttgcaatattaatttcaagctgtttcattgcatgaacgtactgcatatactgctctgttaatgcttgcataggaatatcataaatatctatttcaaatttttggataagatgcagcaataaatctaatggtccattgaaagcatctaatttaacttcatacataatatctacctcgtattgcgtcatatgtgcataattctctaaaatattatagcatgaaaataacttacttttaaattggggtgataacaaaatgcaacaggcactgataaatttctattatcaatttcatactaagcaacattatttcctatgtcatgacattttagaagatgcatggaaagctgaaaataactacagtaagcaagatgcagttgttagtttaatcttgtttgcaactgcttgttaccattatcgccgcaataatttaaaaggcgcctataagtcttttaataaatctaaagaaataatacaaaatgctaaagatagagatgcgttataccttaatttaaatgattatcagttgttaattgagcaacagattgcaaaattgaatgcagcaaagcctttttcatctgttatattaccaataactccagtctttgaacgcatcatcaaggccaactatccagactatgattataatcaggaaacagcaacagatccttttattgtagaccatcacatgcgccgtgatcgttcagaagtgattgcagcaaaagaagaagcgattcaattaagaaaacatagacgtaattaatcaaccaatttaaaaaagccacaatagcacagacatttttagtcatgtgtattgtgacttttgagttattgttcactttatgctctaggatgaaattggttatacatttttctaatttgagatttcgaaacatgtgtatagagttgggtagtagatatgtcagagtgacctaacatctcttgcactgctcttaaatctgcgccattttccaataaatgtgtcgcaaaagagtggcgtaacgtatgtggcgttaacgtctttttaatgtttgcctttacaccattttgtttaatcattttccatattgcttgtcgtgataaaggtttaccatgcatatttaaaaataagacttcagtaacagtcttttttaaaagttgcggtctaatcgtttcaatataagtagttaagtactcaatgactgcgtcgcctaatggtacaattctttctttatcgcctttaccaaatacgcgtacaaatcccattattaagttcacgttttctaactctaaatgtatcaattcagatacacgcattcccgttgcgtacagaagttctaacatcgtacgatcacgatatccattaattttatttaaatctggcgtttctaataaagccaacacttcgtcaacatttaaaacgtcaggcaattttttgtcatattttggtgaatctaataataccgttggatctttcgccgcatatttttctcttatagcaaattgatgaaaactacggattgttgaaataaatcgcgcaatagatttagcagattgcccttggtctattaaatgccccaaacactcttgaattaattgtcgatctataaaatcaatatgcgagatatgatgttcagtcatataatcttgatactttttcaaatcacgtctataagcaccaattgtgttagaacttagtcctttttcaatttgtataaaacgcaaatattcttcaataattgtttccataaccacacctctaaaaaaagcgaaggttaatttaacctacgcaatttactatcctttacctttagcttggcacgtttcacacacaccatggaaagttaaacgatgatctaaaattttaaaattgaactcattttcaactcgattttcaacttctggtaacaaatcttcatcgatttcatctacacgaccacattccatacatactaaatgatggtggaaatgttttgcgccttcttttcttaaatcaaaacgagcgacgccatcaccaaagttaattttgtcgacaacttttagttcagctaacaactctaacgttctgtatactgtcgccaagccaatttcaggcgctttatcttttactttcagatatacgtcttcagcacttagatgatctttttcattttcaattagaactctaacagtagcttcgcgttgtggcgttagcttatatgatgattgttgtaattgttgcttaacgcgatttaatcgttcttccaacgatgtccactcccctactaataattaaaatcattacaaattatttcaaacttcacaattaaaactaacagttttctcaataaaatgcaagcttttctcatttgttatttagaatgattataatttaataataggtgttgcaatgcaatgatagtcttcgcatcttctatttctttattcattagcatcgatttaacattctcaatcggaactttaatgacttcgacaaattcatcttcatctaagtgaactgtaccttcttctaaattatccgtaaaatatattgataattgttcatcgcaaaaacctggtgaaccatacatatctacaacatgtgttaactctttggcaatatatcctgtttcttcttctaattcacgttttgccgcttcgactctatcttcatcatcttctaatttaccagctggaatttctagcaatggtttttctactggtttacgatactgtttcactaatacgacttcttttttaggtgtcactgcacaaacagcaactgcaccattatgataaactaattctcttgttgacgtttcaccgtttggtaatgtcactgtatgaatttctacatctacaattttgccattataaataactgttcgatcaattgttttttcatttaaatccattataatcacgttcctttaaattcatattatatattgatacactatgcttgttagctaaagtgtatcgaaaggagaacagacatgcaaaaaaatatattaaaaagtggtatttcattatctgaattaggtctaggttgcatgagtttaggtacagatttaaaaaaagccgaacaaattatagattgtgctgttgaaaatggtatcacttattttgatacagcagatatgtacgataaaggtataaatgaatcagttgttggtaaggcacttcttaaatatcaacaacgcgatgatatttttattggtacaaaagtaggcaatcgtttaacaaaagatggcagtacaacatgggatccgagtaaatcctatattaaagaggcagttaaaggttcactaaagcgtttaggtatcgatcatatcgatttatatcaacttcatggcggaaccattgatgacccattagacgaaacaataagcgcatttgatgaattgaaacaagaaggaattatacgtgcttacggtatttcttctattcgcccaaatgtaattgattattatttaaaacatagtcaaatcgaaacgataatgtctcaattcaatttgattgataatcgtccagaatcattattagatgcaattcacaacaatgatgttaaagtattggcaagaggacctgtgtctaaaggattattaacttcaaacagtgttaatgtgctcgacaataaatttaaagatggtatttttgattattctcatgatgaattgggtgaaacaatagcctctattaaagaaattgaaagtaatttatctgcattgacatttagttatttaacatcacatgacgtgcttggttccatcattgtaggtgcaagtagcgtcgaccaattaaaagaaaatattgaaaactatcatactaaagttagtttagatcagattaaaacagcaagagctcgtgtaaaggatttggaatataccaatcatttagtgtagaagtcattttcagtaataaaaacagcagcatgaggcgtttcattataaaaatgccttactgctgttgtttatgtacaattcgctataatttatgattatgattactcacttatgatagaaattaaagcgttgtcctcacgcatcagtatttagtaatttcgccttgcggcattgccttaagcaaacttctgccacttcatctcttaataattttattaaaacatctttctatatttcacttcgcatgttgattcatcattattagttattatttgtacacccagcacatttccttgcaacacaagtagtttgaatttttcacaagtataatataatgtaccgtctgaaatttggtctacagaaatatcgcctaaaatatccagcactgtaaattcttcaaatactgatagttgttccgcatatcgtacacaaagtcttaccacactctccgattgacagttcattgccatcccacctatttatgctttatttttaaataatttagggaaacatcgttcaaaaaatctaggcgcaatttgatacattttcaacgcatgatgcatccatttaggccgattaatttccaattgttttgttttaatgccataaatgatatcttctgcaagctgattagcatcaagcataatttcccccatctttttagcatacttcattgatgggtcggctttttgatgaaaaggtgtatcaatcgggccaacattaactgtcatgatatgtaagtttggtgactctagtcttaaagcattcattaatgcataaaaccctgctttcgatgccccataatgtgcagcatttgcttgtgtggaaaatgcagcttgacttgaaatacctacaatatgtgcgttagatgttaaatatggtctcaacacagtatataaaacattaaaactaattaaattaagctgatacgtttcaatcatttctgaaaaactatggtctgaaatagatttgaaataacctaaacctgcactataaatgaatccatcgaatgatgtattgtcttcaaattgcagtgcctgtatcgacttcaaatcatttaagtcacaaggaataacatttatagttttccccaattcctgttcaaagattctagttgctttatcaacatcacgcaccaacaacgttacatgcactttattttctagtaactttcggacaatcgataaacctaaaccactcgtaccaccagtcactataaaatgttgtcctttcatcaattaaccttccttttcaattatatagaatgcaatttatcaactttacataattgagacaagttgattatctttcctaatatatatacaataataagaaaatataacatacaaatcaaaaactaaagggatgtgacgttaatgaaactcgtattttatggagctggtaatatggcacaagctatatttacaggaattattaactcaagcaacttagatgccaatgatatatatttaacaaataaatctaatgaacaagctttaaaagcattcgctgaaaaactaggtgttaactatagttatgatgatgcgacattattaaaagatgcagattatgtatttttaggtaccaaaccacatgattttgatgctctagcaacacgcatcaaaccacatattacaaaagacaattgcttcatttcaattatggcaggtattccgattgattatattaaacaacaattagaatgccaaaatccagttgctagaattatgccaaacacaaatgcgcaagttggacactctgttactggcattagtttttcaaacaactttgaccctaaatctaaagatgaaattaacgatttagttaaagcatttggttctgtaattgaagtatcagaagatcatttacatcaagtaacagctatcaccggaagcggcccagcatttttatatcatgtattcgagcaatatgttaaagctggtacgaaacttggtctagaaaaagaacaagttgaagaatctatacgcaaccttattataggtacaagtaagatgattgaacgttcagatttgagcatggctcaattaagaaaaaatattacctctaaaggtggtacgacacaagctggccttgatacattgtcacaatatgatttagtatctattttcgaagattgtctaaacgctgccgtcgaccgtagtattgaactttctaatatagaagaccaataaaaacaaacccgccaacacatgtatgcatcatcgcaagcactgtgtttgacgggttatttttataatttattgttatttggcaagcattgtttattactttgtcattagattttaaaactatcaaaatcttttacaaaattaaaattaggtgtatcttcattttgtatcaatgtttgataaatttcatttatatcttctgtattatagcgattgctcaaatgtgtaatcaacgtacgtttaacattggcttcttttatcaatgcaaatacgtcttcaatatggctatgatgataattgttggctaaatgcttttcaccatctatataggtcgcttcatgtaccatcacatcagcatctctagaaatcacacgttcattagaacatggttttgtatcaccaaaaattgctacaactggaccctgtttggactcacctctaaaatcttttgattgataaacttgaccattatgttcaaatgtatcatgagattttacttcttgatatttaggacctggttcaagaccaatgttttttaacgcttcaacattgattgtacctgtagtttcaggtgccattactctatatccatatgatggaataccatgattaagtaaatgcgcctctacagtaaaaccatcatgatgatatgtcagatgatcatcgatttcaatatatgtaattggatagtttaaatgtgactctgataaattcatagacatttccacatatgctttaattccttttggtccaaccaatgtaagcggcttctgttcaccgccctgaaaagaacgactagaaagtaatcctggcaaaccaaaaatatgatcgccatgcatatgagtaataaatatatgtgtcacttttcctaatttaattgcatgatgtaaaatttggtgctgtgtaccttcaccaacgtcgaaaagccatatggaattggaatatggttctaaatttaaggcgattgcttgtgtatttctctcttttgtaggcaaacctgcactcgttccaaaaaatgtaacttccatatatgcccctccttttcttcaattcattttatcataaaatttgtatcaatttagttttaatttatacttgaatcaaaatctgttaaaaattcgtctttgctagttaatttttctaactttaacgtagacataactatataaattttgataattacgttatacttatcattaataagtatcacattaaacatgatacatgaatcgatatttcatttaagacactgcatacagtcgagcatattgtatgacctactgaatggattatcttataataataaatcatatatctaattaagaattgaggttttaatcttgagtactaaaaacaaacacatcccatgtttaatcacaatctttggtgcaactggtgacttaagccatcgtaagttgtttccatcaatattccatctctaccaacaagacaatttagatgaacatattgccatcatcggtattggacgtcgtgacattactaatgatgatttccgtaatcaagtaaaatcatcaattcaaaagcacgtaaaagatacaaacaaaattgacgcgtttatggaacatgtcttctatcatagacatgatgttagtaatgaagaaagctatcaagaattactagattttagtaatgaattagatagccaatttgaattaaaaggtaatcgactattctatttagcaatggcaccacaattctttggcgttatttctgattatctaaaatcttctggtcttactgatacaaaaggatttaaacgccttgttatcgaaaaaccattcggtagtgatttaaaatcagccgaagcattaaacaatcaaattcgtaaatcatttaaagaagaagaaatttatcgtattgaccactatttaggaaaagacatggttcaaaatatcgaggtattacgttttgcgaatgcgatgtttgaaccattatggaataacaaatatatttcaaacatccaagttacatcttctgaaatactaggtgttgaagatcgtggtggttattatgaatcaagtggcgcgctaaaagatatggtgcaaaaccacatgttacaaatggttgcattattagctatggaagcacctattagtttaaatagtgaagatatccgtgctgagaaagtaaaagtacttaaatcactgcgtcatttccaatctgaagatgttaaaaagaactttgttcgtggtcaatatggcgaaggctatatcgatggtaaacaagttaaagcataccgtgatgaagatcgcgttgcagatgactctaacacacctacctttgtttcaggtaaattaacaattgataactttagatgggctggtgtaccattctatattcgtactggtaaacgtatgaaatctaaaacaattcaagttgtcgttgaatttaaagaagtaccaatgaacttatactatgaaactgataaactgttagattcaaacctattagtaatcaatatccaacctaatgaaggtgtatctttacatctaaatgctaagaaaaatacacaaggtatcgaaacagaacctgtccaattgtcttactcaatgagcgctcaagataaaatgaatactgtagatgcatatgaaaatctattatttgattgtcttaaaggtgatgccactaacttcacgcactgggaagaattaaaatcaacatggaaatttgttgatgcaattcaagatgaatggaatatggttgatccagaattccctaactatgaatcaggtactaatggtccattagaaagtgatttactacttgctcgtgatggtaaccattggtgggacgatattcaataattgaattaaaacgcacatgttaaacaaaaataaatgagcgaatgacaaggattgattacgaatcaagtaaatcaattgttctatcattcgctttttttctagactatattatgaaattatattttacaatgcccaaaactattttaataatcattgaacaaatgggtgtataatttatagaaataatgtagaataaaaataaatgattgaattaattggagtgaaagttttggacgttatcaagcaaatacaacaggcaattgtttatattgaagatcgtttattagagcctttcaatttgcaagaattaagtgattacgttggtctttcgccataccatcttgatcaatcatttaaaatgattgtcggcttatctccagaagcttatgcacgcgcgcgtaaaatgacactcgctgcaaatgatgtgattaatggtgctacacgacttgtagatatcgctaaaaaatatcactatgcaaattcaaatgattttgcaaatgattttagtgattttcacggcgtatcacctattcaagcctctactaaaaaagatgaattacaaattcaagagcgattatatatcaaattatcaactactgagagagcaccttatccatacagattagaagagacagatgatatttcattggttggatatgcacgatttatagacactaagtatttgtcacatccttttaatgttccggattttttagaagacttgctcattgatggtaaaattaaagagttacgacgatataatgacgttagtccatttgaactatttgttattagttgtcctcttgaaaatggtttagaaatatttgtaggtgtaccaagtgaacgttatcctgcacacttagaaagtcgatttttacctggcaaacattgtgcgaaattcaatttacaaggtgaaattgattatgcaactaatgaagcttggtactatattgaatcaagtttgcagttaacattgccatatgaacgaaatgatttatatgttgaagtgtaccctctcgatatttcatttaatgacccattcactaaaattcagctttggattcctgttaaacagagtccttatgacgaagattaaataataaaaaacaaagaagccccctaatatatctataggtctacaaatggccttagattctattagggggcatattaatatgttaatttagttcgataacacatgcttcatatggacgtaactgttttaaattaactttggcatcataattaaatagctttacttctccatggcttaaatcaaatggtacagttaattctgcttcgtggttagtaagattacctacaataagaacttgcttttcatttaatgttctcgtgtacgcaaaaacttgtgaattttcagcatctactaaatcaaattgaccatatacgtatacatcattagactttcttaattgaattaaatctttataaaattgtaatactgaatgctcatcttctaattgttgtgcaacattgatagttttataattcggattcactgggaaccacggttcaccatttgtaaatcctccatttaacgtatcatcccattgcattggtgtgcgagaattatctcggttctcatctttatatttcgcaagtaaagcgtctacatctccaccttgagctttcactatttgatagtcatttttaacagcaacatcgttaaacgtttcaatactttcaaatggataattcgtcataccaatttcttgaccttgataaatgaatggcgtaccttgttgcaagaaataaacagctgcatgacttgttgctgattcataccaatacttgtcatcgtcaccccacgtcgatacacgtcgtggttggtcgtgattttcaataaacaacgcattccaacctttattttcaagttgtttttgccatctatttaatacagatttatacgaatttacatcaaagtgagaatcaccactattccacagtcccaaatgttcaaattggaatatcatattaaatttaccattttcttccccgacccagtcatcagcatcatcagggcttacaccattcgcttcaccaacagtcataatgtcatacttacttaatgagcgatctttcatctcttgtaaccaagtttgtatacctggctgattcatatctacatcaaatgctggggcatatgttttaccctcaggtacaggtaagtcacccgcttcaaacgtcttcttaatatgcgtaattgcatctactctaaatccatcaatgcctttatcaaaccaccagttcatcatttcaaatacagcatctctaacttccggattaccccaattcaaatcaggttgttttttactgaataaatggaaataatattgctcagtattagcatcatattcccatgtagatccattaaatatactttcccagttgttaggttcagagccatctggctttggatcttgccaaatgtaccaatcacgtttgggattgtctttactagatttggattctataaaccaaggatgttcatcagatgtatgatttacaactaaatctaaaataagcttcatgcctctatcatgaacaccttttaataaacgatcaaagtcttccatcgttccaaattcatccataatctcttggtagtcactaatatcataaccattgtcatcattaggtgatttaaacattggactgagccaaatgacatcgataccgaaatcttttaagtagtccaatttatcaatcattccaggtaaatccccaataccatcgtgattactatcattaaaacttcttggatatacttgatatgctactgcttctttccaccattgcttattcattttaaaactcctttgctatcgctgtgttgattttcttatttttaattctgtatctataatgacgagttcaataacatcctgtgctttgtttttcaatatatttaaaattgctgcaccagcctgttgacctaacattcgaggcttgatgtcaatacaggtttgtggtggtgacgcaatttcggttaaataagaatcattgaacgttgctgtcattacatctttcggaatttcaatattaagttcatataggacacttaaaatcgctaaatgtaacatagcatctaacgaaatgattgcctgtttaatatttgggtccttcaaacgcgtatgtagattttgcatgtaattaaaaataacttctctttcattactagtctcaataatttgataattaattttattttgagaagctatcgtttcaaatccttgaattctatcttttgaaacttcaaaatttcctttttctgtaataaatattaattcatctacaccttgttcaataacatgtcgtgtcaaattttcagaagctaatatattatcattatctatatgtgtaaattgatgatctatatccgatgtaggcttaccaatcacaataaatggcatgctttcatcaattaacatttgtttaatcggatcattttcttttgaatagagcagtataaacgcatcaaccattcgttgtttaatcattttataaacttcatccattaaatcattcatattatttgagactgtcgtttgtgtaccatagccatgctggttacacgtttcagaaattcctagcaatacattgatgtagaatggattcagtcgaataggctcctcagacccttttaacactaaaccaattttatatgtttggtttgtaattaaagttctagcagcggtattaggaaaataattcaattcttccataactttcttcacttttgaaattgtcgcttcgctaatacgttgatttccttttataactcttgaaactgtcgaaggagaaacaccggcttttagtgcaacatctttaatcgtaaccatttaatcacctcctgttaatttctgcattggaaaacgcttccaaccactgtataataccagtttagtcacactttctaaaaaagtcaaaagatttgtgcaaacgattgcataaaacgataaaaataaaaccttcatactgaaattcaatccgaaaatcaatataaaggtttgtataaatattaaaatcgattgtttagtcactaactgcaaaatagttaccttggccatcttgaaaattaaatacacgttgaccattcatttctactatatcatgcccagttaaacctaaatcatttaattttgagtataatgcatcaaagtttttctctttaaacattaaagatggtgttcctaggttcacttccgggctatgcttttcaataaattcttttgccataatcgtcaatgacgtttcagcatctttggtaggtgatacttcaactgcaacatagtcctcagctaacggtgtttcacttacaacaacaaattctaaagtttctgtccaaaatgctttcgctttttcgacatcatcaacatataacataacttgatttaacttttccataaaatagtacctctatttctctatagtacatgctatcataacacagtaaatattttattacttcacaaaatgcttaaaaatatggcgggatgcttttaaggtcaaggataatacttgtgtaattttttataggttgtagctactctatcacactctcttttatatttatcaaaagatataaaaaaggatagtatctttcaactatcctttaatcaatattattcttcaatccattgtgtatggaatacgccttctttatcttttctttcgtacgtatgagcaccgaagtagtcacgttgtgcttgaattaagtttgcaggtaaatcagcagcacggtaactatcatagtaattaatacttgatgagaaaccaggtgttggtacaccattttgaacaccagttgcgacaacatcacgtaacgcatcttgatattcagtaacgatgtttttaaagtaaggatctagcaataagttttgtaatcctggattattatcgtaagcatctttgatcttttgtaagaattgtgcacggataatgcaaccttctctccaaatcatagctaaatcaccaagttttaaattccattcattatcttcacttgctttacgcatttgcgcgaaaccttgtgcataagaacaaattttactcatatataatgctttacgaattttttctaaaaagtctttcttgtcaccatcaaatgatgcttttggaccatttaattctttagaagcatttacgcgctcttctttgattgaagagataaaacgtgcaaatacagattcagtaatgattgttaatggaatacctaattctaatgcgttaattgaagtccattttcctgtacctttttgacctgcagtatcaagaattttttcaactaatgcttctttattttcatctaatttcatgaaaatatcaccagtgatttcaattaaataactttctaattcaccagcattccagtctttgaacgtttgagcaatgtcttcatgagacatgcctaataattctttcatcatagcataactttctgcaattaattgcatgtcagcatattcgataccattgtgtaccattttcacatagtgtccagcaccattaggtccaatataagtaacacatgaagcaccgtcttttgcctttgcagcaattgcatcaagaatatctgcaactttgttataagcttcttcttgtccacccggcattaatgacggaccagttaacgctccaatttcaccaccagaaacgcccataccaataaagttgattgcactttgtgctaatgctttattacgtctgatagtatcttgatagtttgtattaccaccatcaattaaaatatctccatcatctaataaaggtaacaaactatcaatcgttgcgtccgtagctttacctgcttgaaccattaataaaattttacgtggtttttctaaagaattaacaaattcttccaatgaatacgttggatgaatatttttcccttttgattcttcaaccattaaatcagttttttcacttgagcggttaaatacagatacactatatccgcgtgattcaatattccaagctaggtttttacccataacggctaaaccaataactccaatttgttgtgtcatattacttacctcacttgttgatttttcattagtattgtatcacaaaatagacatacactacactaaatcatttcgaatgtcgcgcaactattttgattatttctaacacttgacttgcaagcaagttcaatgatttaatcggcattctctcatttgttgtatggattttttcataacccactcctaaaatgactgaaggaataccaaatgtattaataatactgccgtctgaaccgccaccagaaataattgtatttgcagataatcctaaattacgagcactttcttgtgcaattttaacaaccgcttcattatcattaattttaaatcctggataactttgctccactgtaactactgctttcccacctaattctgatgcagtagtttcaaacacatcagtcatatgtttgacttgtgtttttattctttctggatcgtgagaacgtgcctctgcttctaaaatgacttcatctgcaacaatattcgtagctgaaccgccatgaaacttaccaatattggcagtagttatttcatcaacttgtcctaatttcattcgactaattgctttcgccgcaatattaatagcactaacaccctcttttggcgtacttgcatgagccgttttgccaaaaattttagctgaaattaacatttgcgtcggtgcacctacaaccgtagtaccgacatcagcacttgcatcaatagcataaccaaagtccgcgtccaacaactctgaatttaattctttagcaccaattaaacctgattcttctccaacagtaatcacaaattgaatttgtccatgtgggatttgttgttcctttatcacttgcaaaacttcaagcatcgctgctaatcctgctttatcatctgcacctagaatagtcgtaccatcagagtatatgtagccgtcatcttttacaattggctttacattaattgcgggtacaacagtatccatatggctcgtcaaatataatttaggtacttcgccttcttcgatagtactattcattgtacacactagattattggcacctaatttaggatgtttagccgcttcatcttctttaacatctaaccctaatgctatgaatttttcttttaaaataggttggattgttgattcattccctgtctcagaatcgatttgtacaagttcaaaaaacgtattaagtaatctttgctcattaatcataatggaaccccttttatcaaaattttcatgtacgccaaacggtaaaaattgatgaaataaaatgttacagtaattgacgttacacagatttatcaggtttgtaaattgtgtcatattattttcaatttattatatataattattgtaactcaaactaagctttgtcaaaaatatattgattgatttttcaaagatatcgtataatgaggaaaatgacataagcaaacttactcatgttttttattatattcctttatgatgattgctagttatatcgtctcaagttaaaagttttatatcttatgtcgtaattattaatacaaaggttattcatttggaggcacacaaaatgcaaaataaagttttaagaattatcattatcgttatgcttgtatcagttgtattagcattgttattaacgagtatcattccaattttataaactatatctcaactacctatacaaaatcatacaattaaaaatccatccattataaacgcatgtattaataagttatcgtattgcaacgattactttcaaacatggctcatacggatggattattttttaagctacttcactatgcattttcaatgaaccaaattgcgatttgatttgtaaatattcttctaattcatttaatatttgaataatacttgctctcgagttaagcgctttgtgtgttgttggcaatggcagttcatccaatttcaaacgcgtctcatacaaattgtgtaaacgcattgctgtatagtcattactattcacatttagaccaatttctttcagcagtgacgcaacatcatttaaaagcggatctttatgacagatactttcgatgagcggtttcattctcattaacaattccacttgctcttctcgcatatcaaaataatgatagtatgaattttcgtttctaacaaaatgatttttaacatctcggaacgcgatagacttcgcctttttaatatttaaaagtaacacttcaaattcaatcgcaatggtatcttcatatttttcacaaatataactatatttactaaaaatatcagcaatttgttgctcaattttacatttgtattcgtctagttgtttgtctaaacttggcatcattaaattcattgtaaatgcaatgcttagtccaattaacagtaataatgtttcattaacaattaaatgtgcatcaattgattttgcattaaaaacatgaagtaatataacgcaactcgtaatgacaccttcttgtacttttaatacgacagttaatggtataaataacaatacgataataccgagtacaattggactctgacctaataaactaaatattgctgaacctaaaaacaatactaaaaaacatgatactaatcttgaaataatcgcttgtagcgaatgtacttttgtatgtttaatacataatacgactaatatggcgcttgaagcataattatctaaacctaacagcttactaataattacacctaaagtcatacccactgctgtttttattgttctaaatccaatcttgtaaggatttaactttaacatgggttagcgcctcttatctttcttcacaatatttattgaataatgtttgtaattgattaattacgttcatcacatcatgaccttcgatttgatgtctttcaatcatttctgtaatctttccatcttttactaatgcaaatgacggacttgaaggcgcataaccttcgaagtattcacgcgctctttgtgtcgcttctttatcttgtccagcaaatactgtcactagacgatcaggtaatacgtcataatgtaaagcatgtgatgctgctggtcttgcgataccacctgcacaaccacatacagaattgatcataactagtgttgtaccatcttgtttaagaactttgtcaacatcttctgcagtagttaattgctcatatcccgcagattcaatttcattccttgcttgttctacaacaccgttcatgtataaatcgaaattcatgtccataagttcaatcacctatccctttatatttaaactatcctcattctactaattaataacatattgttcaataaactaatctgaatcacacctatatttagacacaattttaacaatataccaaacattattgtgcttaaaatcatggtaactaatttgttcacatgttttcattaatatgtttcaagtatgatgtcttattttgactttactgcaaaaatgcattcaaccatgttgattattgttctttatcttttttgaatatattgcacatattttagtgccaaaaaataatacatccatcgacaagaacaagataaaacaagttgtcgatagatgcatctatgttatcactaatatatatttgtattttctaaagtatactgttcgatacgctgtttaatatgattcataaatttacctgtttgtaaaccatctaaaatacgatgatcaattgaaatacataaattaaccatgttacgaattgcaatcatatcattaattactactggctttttaatgattgattctacttgtaaaatcgctgcttgtggatgatttataatacccattgatgatactgaaccaaatgtaccagtattatttaccgtaaatgtaccgccctgcatatcttcagctgtcaattgcttattacgcgctttcgttgctaaagtattaatttctctagctatacctttgattgacttttcgtctgcatgcttaatcacaggtacgtataatttattttcatcagcaacagcaattgaaatattaatgtctttatgtaagacaatttcatttccttgccagctactatttaataaaggatatgcttttaaagcatctgctacagcttttacaaagaaagcaaagaacgttagattatatccttctttatttttaaagctgtttttataatgatttctcgtattcacaagatttgtagcatctacttcaatcatcatccatgcatgtggaatctctgttacactattaaccatattttgcgcaattgctttacgcacaccatttactggtattgtgctgttttcactattgtcttcagatgattggttacttgatgtatctactgatgttgattttgtttgaacttgtttgtcagattgagctgtggtaccaccattttcaataactgacattatatccttcttagttacacgaccttcaaatccactacctacaacttgtgataaatcaatgtcatgctctgaagcgagtttaaatacaacaggtgaaaagcgaccattattacgtggttgattttgtttagcagtagatgtctgttccactgttgcactagcttttttagtagatttctgagtatgctcatccacttttgcttgtatctcttcagttgtttcatttgtcttttcatcagcagtttcaattttacagataattgtatcaatagctactgtctgccccgcttcaactaaaatttctgtaattgttcctgatatcgtggaagggacttcagctgtcactttatctgtaataacttcacataatggttcatattcatcaatatgatcaccaacagaaactaaccattgttcaatggtgccttcatgaacactctcacctaacttaggcattgttatttccatgactttccctccctagaattctgctaattcacgcattttatttaagattttttctggattcatcataatttcattttctaatacaggagaaaatggcatagatggtacatctggagcagctaaacgcatgattggtgcatctaaatcgaacaagcaatgctctgcaataatcgctgacacttctgacataatactaccttctaaattatcttcagttacaagtaaaactttacctgtatgtttagcacgatcaataattgtttctttatctaatggataaacagttcgtaaatcaacgacttcaacattgataccgtctgcagctaaaatatccgctgcttgtaaacaataattgaccattaatccataacaaaatactgttaaatcttcaccttcacgtttcacatctgcttttcctaaaggtacagtgtaatattcttctggcacttcttcctttaagaaacgataagcttttttatgctcaaagtacaatactggatcatttgattcgatagatgataataaaagccctttagcatcatacggtgtggaaggaataacaattgttaaacctggcgatgaagcaaatatactttcaatactttgtgaatgatatagtcctccgtgaacaccgccaccaaatggtgcacgaatcgttaatgggcattgccaatcattatttgaacgataacgcattttcgcagcttcactaataatttgatttgtcgcaggtaaaataaaatctgcaaattgaatttctgcaattggtcttttacctaccatagctgcaccaatggcagttccaacaatatttgactcagctaatggcgtatcgataactctgtcttcaccatatttttgttgcagtccttgagtagtaccaaatacgccaccttttctaccaacatcttcaccaagaataaacacatctttattttgttgtaatgctaagtcttgtgcctggcgtatcgcctctaaataagataatttagccattagttaagactcccttcttcgtacacaaatgcataggcttcttcgacacttggatatggcgcgtcttcagcagcctttgtcgctttattgatgatgtctttatgctccgcttctatttctgccaaccaagcatcatcgataatgccagctgaaagcaactcttttttgaacttttcattgcagtctgcttttttaagcgtttcacgctcttctttcgtacgatattggtcgtcatcatctgatgaatgagctgtcatacgacttgttactgcttcaatcaaagttgaaccttgaccagaaatagctcgatctcttgcttctttcatcgctttatacattgctaatggatcattaccatctacttgttcaccatgtataccgtaaccaagtgctctatccgataatttttcagctgcgtattgtaatgaatcaggtactgaaattgcatatttattatttataatgacacatacaaaaggaagtttgtgtacacccgcgaagtttaaaccttcatggaagtcaccttggtttgagctaccttcaccaacagttgctgttgcaattttcttcttaccatccatttttaaagctaaagcagcaccaacagcatggggtatttgagttgctaccggtgaactttgagacaaaatattcttagctctactactaaagtgtgatggcatttgttttccaccagagttaacatcgtctttctttccaaacgctgataaaaacgtatcatacgctgagatacccatataagtaacgaaagctagatctctataataaggcgctgtaatatcaccttcttctaatgcgtatgccatcccaatctgagttgcttcttgtccttgaccacttacaacaaatggaattttacctgcacggttcaataaccacagtctttcatctatttttctacctaaatccatccatttatatattacttttaggtcttcttcgctaaggcctaatgatttataatcaatcatgttaaatcctcctatttatacgtgaatagctctactttctgctttcaatcctaattccatcaacacttcagagatggaaggatgtgcgtgtgttgttagtcctaattctaatgccgagccattcatgaactgtaacagtgatgcctcattaatcaattctgttacatgtggaccaatcatattaatacccacaatttcttcagttgattgatcaatcaccatttcgctatacccttcgtttgtgtcatggctatcaatcactgctttaccaattgctttaaatggtactttaaaacttttaactttcattccctctgcctttgcttgttcaatgtttaaaccgatagaagcaatttcaggttgtgaataaatacacttaggcatcatgttatagtttactgggattgggttcccctcaaacatatgatcaacagccacaacaccttcttttgatccaacatgtgccaattgtaattttcctatacaatcaccagctgcataaatatgtttatcttcagtttgttgaaattcgttcgttaaaatatgtcctgatgttgaaagttttattttagtgttgtttaaaccaatatctgatgtgttaggttttctaccaatcgatagcaacactttatctactttaattatgtctgaggaaatttcaaacgtaacaccatcttcgttaacatttatatcattttcagaaagttttattccctcatagaatttaacaccacgtgctgacaatgatttttttaatagttgtgaagcttgtttactttcagttggtaaaattctttcacctgcttctataactgttacgtcaacacctaaatctatcatcaatgatgcaaattccattccgataacaccaccaccaataataccaatacttgatggtaacgtctttaatgataatatatcatcgctagataaaattttatcatgatcaaatgataagaatggcaactctgcaggcgaagaaccagttgcaattaatacaaattggttgggtaataagtctgattcaccatcttcatattcgacagaaattgtgccactttgaggtgaaaatatagatgtacctagaatacgtcccgtgccattataaatgtcaatgtgattgtgttgcattaaatgctttacaccttgatacatttgattaataatgtcttcttttcgtgccaacatattttcaaaattaacattagcatctttgacatcaacgccaaacattgctgcctgttttactgtttgaaatacttcagcagatttaagcagcgatttagtaggaatacaacctttatggagacaagtacctcctaatagttgtcgttccactattgccacttttttacctaattgagacgcacgtatcgcagcaacatatcctgcagtacctccaccgagaacgactaaatcatattgtttctctgacatgttcttactcctaactaatgatatatatccattgaaaatttattaatacatagttttcatgtccattaattacctattttacatgattgtctatttagtttgaatgcacataaataaatccataaatgagtattcaacacactttggaaattatctacgtctttgattgtgttgtatcatttctcttgcattttctcgagttaaatcagtaacacttgcacctgaaatcattcgtgcaatttcatctactttatcatcgctaattaactcttgaacttgtgttgttgtacgatcatcttttgatgatttcgaaattaataaatgatggtcgctcatcgatgcaacttgtggtaagtgagagatacaaataacttgtatatattctgctatatctcgcattttctctgccattttttgtgcagcttgtccagatacacctgagtcaacctcatcgaataaaattgcagtttgacctctcgatttaacaaaaatactttttaacgctaacataattctagaaagttctccacctgacgcaattttatttaaactttttaatggttcccctttatttggactgattaaaaattctacaaattcgattccatcaatattcggttcttctaattttttaaatgaaatctcaagatttgcgtctttcatttgtaagttttgaatttccgatacaatgtggtctcttaactccctagcgactatacgacgctgctttgataacgcttgtccaacctctataacttgattatacaatgcatttatttcttctcgtaactgcgatgtactttgttcatagttttcaattttattgatttcattattaagcttttcttgatatgcgattaattctgaaatatcttttccatatttacgttttaaattattcagcaaattcatacgagattcatactcgtttaacacttgttcgtcgaattctgtattagccatttcatcatataactcatgttttgcatcttctaaaatgtagtaaaattgatcaatatcttcttttaatttgtcatatttgtttggaactatatcgtttattgttaacaaatggttgcttagttcatataaacgatcagtgatagcattttcatccgttaatgtcatatgtgcgttattaagcgctaagcttaatttttcagagttttgaatgcgtttaatatctatttcaagttgctctatttcgccttcttttagatgtgcttcagacaattcttctaattggaatttcattaaatctaaacgctgtagcaatgcttggtctgctgattctaaatcttctaactcttgctttttggctttataattttgaaaagtttggtgatatttatccaacaaatcttgataacgtgattctgcgtaattatccaataatgttaaatggtatttttgtttcaacaaagactgcgtttcatgttggccatgaatatctaataattcttgcataacttttcgtaaatcttgtaaagtaactgtttgattattaattttacaaagacttttaccagagctgaaaatttcccgtttaactaataaaaaatcttcatctacatcaatatccatatttttcaatatatgtatagcatctttactctcgtcaatatcaaatataccttcgatgacagcctttttttcaccatgtcttacaaaatcagatgaagctctcattccaattaattgtccaattgcatctataataattgatttacctgaacccgtttcaccacttaaaacagttaaaccatcagaaaattgaatttctaattcttcaataatagcaaattgcttgattgataaggtttgtaacataaactcatcgcatccttataacaaattgaaaattcttgacttgatttcatcacttgcctctttgcttcgacaaataattaaacaagtatcatcaccacaaattgtgcctagtacttcttcccaattgatttggtctaatatagctccaatagattgtgcattaccaggtaatgtttttagaacaagtaaattatcagtaccatctatattaacaaaggaatccattaaataacgtcccaatttttctaaaggatggaattttctatcatttggtaaactataaacatattgacctgaaggtataggtactttaataagttgtagttctttaatatcacgagaaacagttgcttgagtgacatttaaatcataatcgtttaatcgtttaactaattcatcttgtgtctctatctgttcatttgaaataatttctctaatttttatatgcctaaccgattttttgggcacagtaaacacctctgattacgaatatttatacatttattttaacacatgcactgatttacgactactaaacacctttacgtaaaaagggtaaacatggtttatctatcttggttatctatttataaatatttttcatattacgcataacaattgcttaaaatatgtataaaaatgaatatatgtgtaataaacttgctaattattagatttaataagcgtcaattgtttgaacatatttaattaaaatcacattgatatcacagatacgaatattgtcgtatagaaattgaaaattctattttttaaatgaaagtcttcaacataattttaagtttcaacatgagaaaaatcgattaacaaacaacgtcagttgaatatgccttttgagacatttcaaactttacaattgttgctaatcgatatatttgcttttagtgatccctgctataaaataaatcaacgatttctaataagtgttttgtattgaattgttcatcaatttgcgttagttcatccactgctgcgtctctatgataagtcaatttatcttctgcgccatctttccctaataaactcacgtacgtacttttattattttcaagatcgctgcccacttttttacctaactttgcttcatcaccatagcagtctaataaatcatctttaatctggaacatcatacctaaatgataactataactttctaaatgttctttagttgtatcatcgacattagcgatatctgctgcactcataaccgcaaaagttaataatgctcctgtttttgttttgtgtatcatttccaaagtttcaagatcaattggttggccttcgctttgcatatctaacatttgaccgccgaccattccaacatgaccacttgctattgacagccgttgtagaacttttatttttacttcatcagttaatctatcatcacttgaaataagttcaaatgctttagttaataaagcatcacctgctaatatcgcagtccactcaccatatactttatgatttgttaattttcctcgtcgataatcatcattatccatcgctggtaggtcatcatgaataagtgaatatgtatgaatcatttctagtgcaattgcgctcttcatacctaactcatactcggtatttagtgaatctaaagtgagtaataacagaactggtcggatgcgtttacctccagcatttaatgaatacaacatactttcttctagctgagtatccattactgatttatttatcgcaaccgataattcattattgacttcatctattaatttattcatcggtagattcgtcattttttacatcctcagcttcttcttttattaagtcattcacctttttttcggcattttttaaagttgtgtcacaagctgctgatagtttcataccacgttgatataaatctaatgattcctctaaagatactgtttcattatctaatttttgaacaatttgctctaattcttgcatcatttcttcaaaactttgcgtttctttagtcattattacaccttactttcgtaacttttgcatctactaagccatctttcattgttaatgtcaattgatcattttctgttaaatctttagtactcgtaatgacttcgtcttttttattaacaattgcatatccacgcaacattgtattagttggacttaaattgtttaagttttctactttatttttcaaatcatttttataacttaatatcttagaattcaataatttaacaagttggtttgtcaattgaagattattttgttgttcttgattaacactacttagtaatgcttttaaattataacgttgttgcaacagcattaatcgatgtctctgttgttcaaaagttgcctgaatttgttgtttcagtctcttttctaaatcatctcgacgttgtatctgttgatcatacaataaagttggttgtttaaacttgtaatacgatgacaaatgttcaacatgtttacgttgttgttctaaatgtttcttgatgaaacgagtcaatgtaaactgatattgctgtatttgttgcagcaattcatattggtctggtgttgcaataacagcagcttgagttggagtcgcagctctgatgtctgcagcaaaatcacttaatgtaaagtctgtttcatgaccaactgctgatataatcggtgtcttacaattatatattgcacggacgacagcttcttcgttgaaattccataaatcttctatggatccaccgcctcgacctacaataatggtatctacacctaaactatctgcatattcaattttttcaataatgtcgtcttttgctttttcaccttgaaccaaagtactaatttgtatttgttcagctaatggaaaacgactatttatcgttgaatggatatctcgaattgcggcacctgtactcgctgttaaaactgcaatttttttaggaaacttaggtattgatttcttattcgctttatcaaaacaaccttcttcagttaattttttctttaatgcttctaatttttgatataagttccctataccatctaattgcattttatttacataaatttgatagtttccacgacgttcaaaaacagaaacacgtgcttctaataagacttcatctccttctttaggttcgaagtttaatttagaagcactacctttgaacatcatggcacttataacgctttctttatctttcacattaaagtataaatgaccacttgaatgctttttgaaatttgaaagctcacctttaatcaatacagattggagatgtggatcttgatcaaatttatatttaatatatttcgttaaagctgaaacacttaaataatctgacatataacatcactcaattttatttttttatattactcaatacaccatttataaatttataatgatcatcatcactgaattgttttgttaattcaactgcttcattcattacgactttagcaggtgtatcactgtgtaatatttcatatgttgccattcttaaaataatacgatccgtttttaataaacgtgcaatagtccaatcttttaaataaggactaattgtctcgtctaatacaggttcgtgacctttaacgccagaaactagccaatgaataaattcgaagtctaaatctggattatcgtctttaataaagcttatcgcttcatttatcgttaaatcactgtccttcatttctaattgaaataaagtttgaaaagcttgcactcgggattctttacgactcatttttaactccttcaaacgtttgtatttttctttatttaattactgaattaggtatgacattacttttcaataacgatttgtgtaatgtgaatattaatttgcttaggttctatcgctgtcatattagaaattgaattaaaaattgacgtttgaattttgtttgcagtttttgaaatattaacaccatgttttaatgcacaatatacatctatatatatgccatcttctttactctcgatttttaaatcacggcttaaatttttacgactaactttttctaaatttgtttcttttaattcagcaaaatggccagtgatgccttcgacttccgaagtagctatacttgcaataacagatagcacttctggcgctatttctactttacctaattttgaatttgaataatcagttactttgaccatggattgacctcctattaaccttcatcattcataatgctattttgctctaaaaagtttgtattaaatttaccgcttctaaatatatcgttattcaataatttaatatggaatggaatagttgtatcaataccaagaaccacaaattcacttagtgcacgaatgccagccataatcgcttcatctcgtgtcggttcatgtatgattaatttcgctaccatcgaatcataatatggcggtatcgtataattagtataacatgctgactctattcgaacaccatatccacctggtgcaagatattgctcaattttacctggtgatggcataaagttcttgtaaggattttcagcattaattctaaattcaattgcgtgtcctgttaatttaatatcttcttgtttatacggtaacacgtcacccatagcaacttgtaattgtaatttaactaaatcaattcctgttaccatttcagttacaggatgttctacttgaatacgtgtattcatttccataaaataaaatttattatcatttaaatcatatataaactcaattgttcccgcattttcataatttacagctttcgctgcacgaactgcggcatttcccatttcacgacgtgtttcatcatctaaaattggggaaggtgcttcttccactaatttctgcatacgtctttgaattgtacaatcacgttctcctaaatgaattacattaccatagctgtccccaacaatttggatttcaatatggcggaagttttcgatgaatttctccatataaagtccaccattaccaaatgcagtttgagcttcttgttctgtcattcggaagccagtttcaagttctttttcatcacgagcaacacggataccttttccgccaccgccagcagtagctttaatgatgaccggatagccaatttttttggcgattttcttagcttctgagacgtctttcattaaaccgtcactaccaggaacaactggaacattggctttgatcatttctgccttagcaacatctttgatacccattttttggatagattgataacttggtccaatgaacttcaattggcatgcttcgcataattctgcaaaatcagcattttcagctaaaaagccataacccggatgaacgccatcacaacctgtagaagttgcaatagataagatgttcggaatatttaaatatgaatctttagacaaagtgggacctacgcaatatgcttcatcagcaatttgagtatgtagcgcatctttatccccttcagaatagattgcaacagtttggatgcctaaatcacgacaagcgcgaataatcctaactgcgatttcaccgcggtttgcaattaaaacctttttcattatttcaccttaaataacggttggccatactctaccatttgtccgtcttctactaagatttcaacaatttcacctgaaatttctgcttgaatttcattaaatagtttcattgcctctaaaatacacactgttgtttcatttgaaacagtgtccccaacttgcacatatgcttcttcgtctggagatggcgatttgtaaaatgtacctaccataggtgcattaattgttttgtgattatctgaagttggctttggagcttcagttttattgctatcagttgattgtgcttgaggcataggcattgccgcagcttcaactggcatttgtgagatttgtggcgtgataatctcagtttctttttctttcttaagcgtcactttgcctttagtatcttcaatattgatttccgttaaagttgatttatccagaatttcaattaattctttgatttctttaaagttcattattactgactccttcagtttgttttcatctacccgtctattttacttgagacaactcttcaattcaagcatgttcatattgctggcgacattataagtctatcccaaagttataataaaaccacattttaaattaaaaacacttgtgtatttattacttaacattgactcatcttaactcttgattaaaaattttatgcattcagttaaacatatcaatgttatttttattagctattatgttttatcctcaacaatatgatatgtagatatatacctctactcatgtctatgttttttcactaccaattagacgattcgttttatattttaaaaattattttaaaaataaaaagcctcatatcagcatataacctataatcattttaggcaatagctttatgagacttatttagaatatcttacgttaaatcagtatagtgaatacaagctatttgttaacaaattagagattatcctcttgaaatgtagcttccatcaccagtgttgataattaaaacgtcaccttcgtttacaaataaaggtacatttaatgtataaccagtttcaacagttgccgatttagtggcaccagttgcagtatcacctttaataccaggttctgtttcagttactgttaattcaacagttttaggtaattcaacaccgatagtttcaccttcgtatgtttgaatttgtacttccataccttcttttaagtaattcaattcttcttttaagtaatcacttgaaagttctgtttgttcaaagctttcattatccataaatacatgattatctccgtcagcatataaatattgcatgcgacgattttcaatcattgctggttcaactttttcaccagctctaaacgttttctcttgaattgcaccagttcttaaattacgtaattttgaacgaacgaatgctgaacctttaccaggctttacatgttggaagtctataactttccaaatagcgttatcaacagaaattgttaaacctgttttaaaatcattaaccgaaatcattcagtttcctcctcattttacacgcttatgttaaaactataaggtcttttgtgcatttagtaaagacttgacaaccattttctgtaattaaaatatcatcttctattcttataccgcccaaaccttctatataaacaccaggttctactgtaacacagttgttaacttgaagtttatcttgtatcgtacgagccagcattggcccttcatggatttctaaaccaataccatgtcctagtgaatgtccaaattcttttccatacccttttgactctaaatagtttcttgaaatggcatcagcttctgcaccagtcatgccaggtctaatctcattaattgctttcatttgagattcaagtactatttgatatatttctttcagtttaggatctggttctccaatagcaaatgttctagtaatatctgaacaatagccgttataatacgcgccaaaatctaatgtaatcatgtcgcctttttcaataattttatcacttgcaacaccatgtggtaatgcacctctatgaccagatgctacaatcgtatcgaatgatggtccatctgctcctaattctagcattttgctttctaatattgcctttaattctttttcagtcatgcctgcttttacaacagttaaaatatattcatatgtttcatcaacaatattagctgctttttgaattaaagcaatttcgtcagcatctttgacgtctctaattttatctacagtattagaaatgcttattaatgatatacggcttttatttaattcaaggtatgtatcataacttacatgatgcccctcaaaacctacattttcaaaattttcttggtgtagcaattctttaatctcaccaataatagtagatttacgattaataatttcataatttggcgcctgcttagttgcttgatcaatatatctaaagtctgttatcaaatattgtttatctttagatatgataagtgctccactggtaccagtaaaacctgataaatatcttctattgtaatccgaaagaatgataatcgcatctaaatgtttttgttctaaaatacgatgcacttgtgttattctgctcatcttattacctcctagtgaaacgtttgtgcatttcaactttatacattaaaataatatcataataaggataaaaaataatagatattgattttagggagatagtaatgaaaaaattggtttcaattgttggcgcaacattattgttagctggatgtggatcacaaaatttagcaccattagaagaaaaaacaacagatttaagagaagataatcatcaactcaaactagatattcaagaacttaatcaacaaattagtgattctaaatctaaaattaaagggcttgaaaaggataaagaaaacagtaaaaaaactgcatctaataatacgaaaattaaattgatgaatgttacatcaacatactacgacaaagttgctaaagctttgaaatcctataacgatattgagaaagatgtaagtaaaaacaaaggcgataagaatgttcaatcgaaattaaatcaaatttctaatgatattcaaagtgctcacacttcatacaaagatgctatcgatggtttatcacttagtgatgatgataaaaaaacgtctaaaaatatcgataaattaaactctgatttgaatcatgcatttgatgatattaaaaatggctatcaaaataaagataaaaaacaacttacaaaaggacaacaagcgttgtcaaaattaaacttaaatgcaaaatcatgataggagtcttttaatgcgtaatataatattttatcttgtacttattattgctgcgattggattagtaatgaatctagatgcctttattttttcaatcgtcagaatgttaatcagctttgctgtaatagctggtattatttatctgatttattatttcttcatcttaactgaagaccaacgcaaatatcgcaaagcaatgcgtaagtataaaagaaatcaaagaagaaaatagataaaaaaacggaagcacttgtaggtaaaatagtctacgtgcttccattttttattctaaaaactactttctaaacatccattcatctgaacgatatttttcagttaattcttccacttctgccaattgagcttctgttaattcaagtggcttaaattctatatttaaacctttcttaaaacctttctcgaaagcttcttccatttgactaatagtaatgtgttcatctgaaatatcattgatggcaactgctttttcaacgaatgcctctttcatttttaattttaatctttcatttttataaataaacatatcaaacagttcatcaatatcaatatcttgtaaaatcgaaccgtgttggaggattacgcccttttgtctcgtttgagcactcccagcaatcttacggccttcaacaactagctcataccaacttggtgcatcaaaacacactgaacttcgaggttgttttaatttttgacgctcttcaggcgttttaggtaccgcaaaataagtatcaaatcctaagtttttaaatccttctaataatccttgtgaaatcactctgtacgcttctgtaactgtagaaggcatattcggatgcgattcaggcacaatcacactgtaagttaactctttatcatgtagcaccccacggccaccagtttgacgccttacgagaccaaaacctttctctttaaccttatcaatatcaatttctttttgtagcctttggaaataccctattgataatgttgcaggattccatgtgtaaaaacgtataactggatcaatttcacctctagagacaaaatttaataacgcttcatccattgccatattataatatgggtctttacttcctgtattaataaaattccaagtttcagtcatattcaagaactcctatcagcaaaatgtataatatttgattcgctaattaatcaatttaactaaatgaataataattgcaattctttagtgaaatattttgataatttgacctaacagtcttataattatattatcgtttaattagggaggatgcaagatgagtgctagtttgtacatcgcaataattttagttatagcaattattgcttatatgattgttcaacaaattcttaacaagcgagctgttaaagaattagatcaaaatgaattccataatgggattagaaaagctcaagtcatcgatgttagagagaaagttgactatgactacggtcacattaatgggtctcgcaatattcctatgacaatgttcaggcaacgattccaaggattaagaaaagatcaaccggtatacttatgtgatgccaatgggattgctagctatagagccgctcgtattttgaaaaagaatggatatacagatatctatatgttaaaaggcggctataaaaaatggactggaaaaataaagtctaaaaaatagtttttgtaaatttaatatacgatttaataaaatctgagtgttaattgatcatcaataacaatactcagattttaattttttaacaaagtctgttactatatttctctagcttcactgatcattaaacttagtttcagcataataaagaaagttcagctcattttcaatacgattcaattaccgcaatctaaaaaatgaaaagacaatttctatgaaagaataataccaaaccctaagagttattacttcggtttagttttcttgtttaaatagaaattgtctttttcaattgattttgaaaccattatccttaaatcttcatacaaagttagaataataattctcggaatatgtgtttaatactttatttttcctgtttaagattttcaaactttaatattggtttacgagcagctgtagcttcgtctaatcgatcaatcacagttgtatgtggtgcttctagcactttatcaggatcatttttagcttcttcagcaatactaattaatgtatcgataaaataatcaagtgtttctttagactctgtctcagtcggttcaatcatcataccttcttcaacatttaatgggaagtatattgttggtggatgtacaccgaaatctaataatcgcttagccatgtctaaagtacgtacaccaaattctttttgacgcacaccacttaacacaaactcgtgtttacaatattgtttataaggtatttcaaagtgtttagataaacgtgctttaatataattcgcattaagaaccgctgcttcagaaacctctttaagtccagttgctcccatagttcgaatatacgtataagctcttaagtaaataccaaagttaccataaaatggttttacacgtccgatagaatttttaatgtcattatcatatttaaatttgtcgccatctttaataaccattggctttggtaagtaacttgctagttcttttactacaccgactggacctgaaccaggaccgccaccaccatgtggaccagtaaatgttttatgcaagtttaaatgaacagcatcaaatcccatatctcctgggcgaactttgtccataatagcgtttaaattcgcaccatcataatataatagaccaccagcattatggacgatttcacggatttccataatatttttttcgaaaatacctaaagtgtttggattagttaacataatagctgctgtattttcatttacaacacgtttcaagtcatcaatatcaacttcgccacgttcgtttgattttacagtaactgatttaaatcctgcaaatgaagctgaggctggattcgtaccatgcgcagaatctggcacaatgacttcatcacgatgaccttcaccattattctcatggtaagctttaaatatcatcaatgcagtccattcaccatgtgcgccagcagctggttgtaatgtcacctcatccataccagtaatttcttttaattcttcttgcaaactataaataatttctaatgaaccttgaacttgatcttcatcttgtaatggatgtgattcactaaatcctggtattctagcaaccttttcattaattttagggttatacttcatcgtacatgaacccaatggataaaatccgttgtctacaccgaaatttttatttgaaagttcagtataatgacgtactaagtctagttcagcaacttcaggaaactccgctttgtttttacgaataaatttatcatctaacaatgactcaacagaatttgttttaatatcactttttggtaatgaatatgcatatctgccttcacgagatctttcaaaaattaatggacttgatttactagtcatttaactcaccagccttttctacaaatgtatcgatttcatcttttgttcttaattcagttacagctattaacatgtgatttttaaagtcgtctgaaacaacacctaaatcaaaaccaccgataatattgtacttcactaattcctcgttaacttgttgaattggtttgtcaaatttgactacaaactcattgaaagatgtaccatctaatacttcaaaaccttttttaataaattgttgtttagcatagttagcatgttctatattttgaactgcaatatcatagataccttgtttaccaagtgctgacattgcaattgatgacgctaaagcatttaatgcttggttagaacaaatattagatgtcgctttatcgcgtcgaatatgttgttcacgtgcttgtaatgttaatacaaagccacgattaccttcatcatcttgtgtttgaccgactaatctacctggcactttacgcattaactttttcgtcgttgcaaaatatccacaatgtggcccaccgaattgagcaggaattccgaatggctgagtatcacctacaacaatatctgcaccaaatgaacctggaggtgtaagtaatcccaatgctaatggatttgcatatacgataaataatgcttttttatcttcaataaagctatgaatcttttcaagatcttcaattgaaccgtaaaagtttggatattgtactgcaacagctgctgtttcatcatccactgctgcttctaattttttcaaatctgtaacagtgccatctaaatcgatttccactacttcgaattccttacgcgtcttagcataagtatgaagtacttgtaatgcttgataatgtaaaccttttgagactacaattttatttttctttgtttgactaaatgctaagatacatgcttcagcaaagctagtcatcccatcatacatagaagaatttgctacatccatatctgttaattcacaaattaaagtttggaactcaaaaatggcttgtaattcaccttgagaaatttccggttgatatggcgtatatgctgtgtaaaattctgatcttgaaatcatagcatccacaactgatggcgcgtaatgatcataaacaccagcacccaaaaatgatgtatgcgtttctttagtgatattcttgcttgcaatgcgatttaatcttctaagtaacgttgtttccgcttcgccttcagcaatatttaaatctctatttaataaaatgtcacttggtacatcaccgaataattctcctatagattttgcaccaattgtttgtaacatttcttgcttgtctttttcagttaaaggtatataacgatgactcacaatgcacacccctttttaattatttatcaatttgatttttcttaacaattttcgcttttaattgacgcttacgaacttgaacaagcaactctctacccatttcaaactcatctctttttatcattgcaagtgcaattgattttcctgatgatggagactgtgttcctgaagttacttctccaataatatttccatctaaatccataacttcataaccagttcttgcaattcctttttcaagtaattctaatcccactgttcttcttggtgcaccattttctttttgatcttttaatacagatttaccaataaaatcagcatcaattaatggtttacttgcaaaagcgataccaccttcatatggtgtaattgattcagttaaatcttgtccatgtaatggcaatccagcctctaatcttaatgtatcacgagcgcctaacccacatggcataacattatactctaataaaccatcccaaattttttcagtatcatcgatattacaataaatttcaaacccatcttcacctgtgtaacctgactgagataaaatgacgtttgctccaaataatttgacaccctgtttaaattcaaacattttcatttcagttacatcttcatcaactaattgattaattaaatctctagcttttggtccttgtattgctaattgaccatattggtttgatacattttgtacttcaacatcaaatttctctttgtgttttaaaatccaattaaaatctttttcagtattagcagcattaacaactaataaataattgtcgtcagctaatttatatattactaaatcatcaataataccgccttcttcattacataaagcagtatataatgcttttgaagtagttaaattatcagtatcatttgataataaatattgcacaaactgactagcatctttacctgttacttcaatttcacccatatgactaacatcaaacaggccaatttcgtatcgaacagcattatgctcctctttaatacttgaaaattgaacaggcatcgcccatcctccgaattccacaatttttgcacctctatcaacataattttgatataaaggtgtttgttttaaatcacttgacattgaaatacccccttaaaattataaaaacaggatagcaatcgctaccctgtttataaatcaccaattcaggaacgcgttacagtattatccttttgcctgagagtttcgtaataaattacttgcaccttcggcgatagagtcttaacgctctattctctctaatactgatcactcgcttttattaaatttagcaattcataatatatttctgaaattgatagcaaatgactatcaaatttcttgaatgcgatttcattatatcttaaattccgcgagcaatacaagtcatttaactgcttgattgtcttattatttgcattaggtcgatgtgggtcatcattgattcgactatatataatatcaatattacaatctaaccaaataatgtttttttgatttttcaaaaaattaaatgcctcttcactctcaataataccaccaccagtagcaattatatctgcagtgttaatacattcttgcaaacatgtgaactctaaattcctgaaatattgttcaccatgtttacaaaatatttctggtattgttaacttatacttctcttcgatatatgaatctatatcaataaatgataaattttgctcatctgcaacgtatttaccaatcgtagatttaccggtacccatgaaaccaattaaaattattggtgatttatcatgattcatgcgttttcccttctttcaataacaaaacaatcttatagttatagtcagtttcaatattatataatgtctttaattttaaactatattgactgatataaaaagtgaaaatggaaaaataaattgctgttagcatcaataagaacggcgtaacatatcctttttctttatataaatcaaaattaataaattatttcacatcctttttaatagtactcatttaaatactagtaagttatacataaatagttttagtctgcacatttgtaccgactttaactgttatcgttattttaataatggatttatagtagatatttgcagtaaatgctgtaacattattaatcattgttatatttcctctgtcatttacaactttaataattttattattaattaatttgtattcgatcatttcttcacctttatgtaaaatgatacggtgttgcctaatttcaatatcgtttctatctactcctttaaaatcatctagaatatctcttgagaaaaattcgaaatctacagttgttaaatccctactttcaattagaaaagttttactaagtctaattaagtctggaacaattagtaaagttatacttataaccatcatcgctactaacatttcaatgagcgaaaaagctttgacattaatactgtatacatgtcttttgataagaagtggtattttttgaaatagcacaaatttgttggtcactttgcttaatatcatacttccctatagttacccccttcttaagttcttctttattaattttagatacagtcgtcaaaattactttagaagcatcaattgtttgtagtttatggtttatactcgcttgcatttgattcatcattggtatcaatagtaatgtaatcaatccaattagcaaaaatccagccatactatctattaagaatgaacctttacacttatagcttttcataacgaattcttcctttttcaatatggaatattattctataaattgaattgttattgtaaattgttatgctaccaaatttattgatattcccttttttatcaaaggcaataatatcaacttttgcaacattaattattttgcctacttttaattttagaaatcgtatattattattctctattactttaatagtgtcactgttttcataaaatctaacattgatatatccttgatttgctatagcttgcgacttaatataattcaattcagtaataaaagaaatgatatttgcctcatcatctattactctaagattgcttaatcctttagatgtcattgtcaaaagtagaaatatactgattaacatcattaccacaagcatctcaatcatagtaaatgctgactgctttctaatttgcaactgcttctccattactaattgtgattgtctctcctgatttacatgtcttttgtgcttcttttataaaaccatctgcaattaagtcttcaatagacgatggatttctattatgtttcaatgcatacgcttcaatttgactattaaccatttttacctgtgcattacaacctgttgattgtatgtgagcagtttgtttagcaatatttggaatgattaaaattaataataaactgatgattaataacactaatagcatctctatcaatgtaaacgcttgagttttcttaagaaatttaaacatatattaacctccattattttatactttgcatcatttgaaacattggtaacataattactaaataaattgcgacaataaataaacctaaaatcaaaaataaaataggctgtaaaaactgagtctgttttatcgctttatcttctatttgttttactaatatttgcgaatataactttagttctacttctagcttccctctcttttcaccttgtagcacaaacttaattaattgaggcttaaagcattttagtttttctaaaatttgaggcaaaccatatcccatttctgaataagttaataagtatttacctagaaactgtctaaatggatcactactatggttaatataaacgtctactattgattgaagtgtaataccatttttataaaacaacactaattcattagttacaaaataagttttaaataattggaaatagcctgatattagcggtagtttcatcacaaagtttatcttattgagcatatttaaattgttataaattaatttcataataatagccaacatagatactattatgagcattactacaattatagtaggtaagctggtaatgaaaaaagacaatgttttttgaaaagaagatagttgaatattcatagaagtatataattgttgaaactgtggaattactgtgaggtttaatataataatcatagcaataaagatagaaactagtattaaggggtattgcagtgtctttaacaatcgttgttctgactttctattcactttcatataatttacggtttcttctagaacgtctataatattgccaaatctttctgccaaatatacttgcatgacgatagtatcgctataacctatcagtgataatatttgattgcatggtgcaccatttgaaatttcacttagaatggtggtacctaattgcttatttttatatgtcatttgaagatttaaaaattgaaaactttgatacagagtgaaaccatatttcaacaaattacataaatttgaaagtaagtcgatttgttgggccttacttaattgtcgcttcttagaatgtagtttaaatgtatttatgcattgtagtttcacaaatgacacctgcttttgtcatatcatcaagtttatcttctaagttcttaaatgatgatggtaatgaatgattatgggaaaagaaatatcggagttgttgctgagatagaatttcacatactaattgtcgctgttgcttaatagtagttacaagtcgttggtttataattaagttagttgcctgtatcaattcttgtacagaaatgcccatttctaatagccttaaaatagcacctttacaatcagttgcatgcaatgtagtcagaacaaggtgaccacttaaactagcctgtataacacacttggcaacatctttatctctgatttcacctattaaaataacatcaggatcacatcttaaaatagctttaaacgaatttacatagtttatgccagctttatcattcacattaatttggacgataccaggaatttgcatctctacaggatcctctatagaaattacatttaaattcaaggctttattcgcgtatgagaccatttgatacattaatgtactctttcctgaaccagttggtccactaaacaatagtaatccttgtttcttattcatgaggtgtttaaaatcattgaatttataagttgatttctgtggttgaaaaaattgaggtacaattctgataacacaactttcttggccaagtgacaatggtaaagttgatattctcaaaaaatatattttattgaaaaggtaactatatcgaccgctctgtgcgacttgctgtgtagaaacatcaagcccagcttgaaacttcatataaactaataacttttgataaatgctattcccaatttgttcatactgctccaagttatcattaattctaaatttaatacttacttcatttttaactggaataaaatgtacatcactcgctttcatttctatcgctttattaattatttcttgaaatagaatcttcaaaaaaacacctcctacatataatcacgtaggaggtgtttttattacttcaatttaaccgtgtaaaaatggatttaattgttcatcatcaaccgtcgtatatggaccatgtccagggaataaaggtaaatcgccttctaattcaaatattttatcttgaatagaatcaactagcgtttcataatcacctttatataaatctgtacgtccgattccattattaaataatgtatctccaacaactgcgaattcatcgaacacatatgttaaacttcctggtgaatgtccaggtgtgtgtaacacattaaacttaaatccttctatttctgtgctaccttcgtttaacttttcaggagttaccttacttgtaataattggtaatccatattgcttaaatttatctgccccatttttaacgggatcttttagaaaatcaaactctgcttcatgcatataaaccgggacatcgaatcgatcaactatatcatcgactgctccgatatgatcaaagtgtgcatgtgttaataaaatagcttttaacggtttatttatttggtttaattttttaataattttttcactttcacctgaagggtcaatcagaataacagctttgtcattttcgatgaaatacgtattagtatcaactaagcctaaagttaagcttgaaatcctcataggttttcaccactattttctaaatgtttttgtactgatgttagtttatcattcatttttctagatttgtctcgtcggtcatcaatacggatatttgtacaaactctacttaaacctttatcaaaaggtaattcatgtatcacttgcacaacttctaatacatcgcttaattcaccttcaattagagtattcattggtgttaattgaaaatcaattttacccattgctttatattcttgaagttttttctgaatatctgcaatatatttactaacactcggaccttccgttccaactggaataacaaccacatcaacaatagccattattttaccccctctttatctaatacataggtcttgattaatcctgctgctcctgtaatacctgcatcattacctaatttcgcttgtacaatttcagtttcaaattgagcaggtgcaaatgttaaattatgatattctgttttaatattttcaattaaaataggtcctgcagtagacattcctccacctagaacgatatatttcggattacttgtaacactaataatactacataaatatccaatatagtttgcaaccttttcagtaatgaaaatacagaattggtcaccagcttttgccgcatcaaaaacagcttttgctgtaaccttattttctttaatcaattctaatatagaagatctaaacgtcaacttcggatagtagaagttaactaagttaacaacgcctgtcgctgaagcaactgtttcaatacatccagaacgaccacaattacatttaaatcgttgatcgaagtctgctctaaaatgacctatttctgcgccagagccattatgaccatgtacgatttcaccatttgaaataattcctccacctagacctgtaccaagtgtgatggcaacaacatcatcggcaccttcaccagcacctttgtgtttctcccctaaagcagctatgttagcatcattatctacatacactggacaatcaacgaattgttcaaaaatctcacgtacattaactttttctggccaatataagtttactgctccatttactgtacctttttcaaagtcaacaggacctggtacaccaatacctacgccaagtacatttgaaaaattataattattttcatttactttttcaacaaacgaatcataaattcctttcaaaagtgtatatcctgtactatcagatgtatcagtgtgaatagaccatttatgtaattgttctaattcaggtgtgaaaatacctaatttacaagtcgtcccgcctacatcagctgctaaaataatttttgtcatttctgttcattccttctctgattaattatcaacgtacatttcaaatattcttccttagataacagttcatattgatacaatgatgaaatctcctgttgaatcatttcgtacatatcttctggatttttaaaatatattagaaatccgtaacttttcaataactgttgtacatcataaaagttatttatttttcgactcatttgatttagtcaactctttttctaagttaatataatctgtatttttagggtctgcatttaatgctttacgcacatattttaatgctttttcatcatcatttaatgaacgatttgctatcgctaactcaaaatttaataaacctgatttaggaaacattctaagtcctcgctcccattctgtcataccttcggacttagaattgatagtagccataatcataccacttaaataatatgtttgatcatcggcataatttttatttattgtctgcttcacaatattttgagcattatcataattaccactagtcatatcatctttgatcaatttattataaatattatcttctttaattgtaaaaattctaatttgaagtgcaataaatataacaagcataccaattagtaaaatccaaaaaatattacgattcactttatagtaatagccaattaaagttattaataaaccaccaatgaatcctccaatatgcgccacaatatttatatttgacataaacagagaaacaccaactaatatcactaatgcaattaataactgtcctaacatttttttgttaaatgtttttgaaacatacatcatcgcaaaaattgatccaatcagaccaaatatagcaccactagccccaactgaaattgtagtcgtattaaatgatagtgatacaaagtttccaaacaaccctgcaataaagtatacagttaacatccgccatgaaccaataattgcttcgactattttaccaaaaataaataatgaaagcatattcataagtatatgttcaaaactaaaatgtaaaaacatcgatgtaacaattcgataccattcaccatgtacgacattaaaatgcactaacccgccaacatctaataattttacatccgaaaaattatttaaatataaaatcatacataaccatattaagacatttacaaatattattgtgtatgttgccggtgaaaatttctgcatatatttatctaaaaagttatcggttaatactttgcgtttatagaacatatatgtctttttatcattatcttctgaaataagtctagccaaaaatatattcggcatatgctttatcaaatcttttgtgtgtcttataacattgaatttaattctaattggcgaaacttcatttaattgttcttctgaaaattccgattctgtaaaataataaaattcaaaactttgtggttcgaaagaaataaaatttgctatttcatctttgtgttcaagcactttcgctttgtcaaaacgtatttcttgggtagacttgatatgttgtttaaaaatgactacttgtttttttcttttatgggctaaccaaatttcttggtcatctttttccctactgacaatatcaaaattcaagtacctaatccaataatatattgttttccaaaattgtttgtctatgttcatttagtcctccactatgctgcttgatatataatcaatttatcgactggttgatcgaatgattccggttcaaatgatgttatttgaaaatcgtataataagcttattgtctttgtctgataattagctaaaaacctgtcgtaatagccaccaccatacccaattctatatccatcgtcttgaaatccaacaccaggaacaacaattaaatctaggttattcgttgtttcaccttttgaagttggatagtaaatccccttattatcgacatcaatatctttgagattaaatatctctttaaaagtcatttgatgatttaaataatccattttcggtacaaaaatacgtttatgatccattaaggcttgttcaataatagaaaaagtatctacttcatgattaaaagaaagaactagcgcaattgcgtttgcttctttgtattcttcagttgcaaaaaattgatttcttaaccatgtgtctgcttttcgcttttcagctttattaaaattcttcattttatgtaaaatgtattttctaatctcatttttagtcacattatcacccactttattcaattctattatatcgttaataacaatacatgtcattatgttgtcatgatgaattatgcgacaattctaaaatttattatttcaattgaaaatcttttatcatttcatacgtgtgcataattaaaaaggtgaaacctcttattttgagatttcaccttttttattgttaatttaaatttaattttaatgattattttgtttcacggtgtaaagtttgtttgttttcacgtgaacagaatttcttcatttcaacacgttctggattatttcttttgttcttagttgtaatgtagtttctgtcaccacattccgtacaagctaaagttacgtttacgcgcatggttattcctccttatcatttctaaatacgactttattattataccaacatctataatatttgcaaagttaaaattttacaaccatgcgctacacaatcgtcaggttaaattttatttgtctttgtctttatttttatcatttttacctaactgcttaaagtagtagttaattacatctctacctaagtctccacctgttaaccatggtggtggtacaggctgatttgtatatacaattgaaaacgctaattttggatcatcaattggcgcgtatcctatataagtagagttaactcttggctctccgttttggaacacttctgcggtacccgttttaccagcagtaggtactactgtatctttaaaactaacatatccagtaccatctttatcattaaatgccattttgaatccttcttgaatttgtttgatttccttttcagtattattaaccttgttcaagacagtgccattaattttcttcttgagtggaccaacctcatctttattagttgattcatgaatcgttaatccaatgtgtggctgtattctataaccatcattcgctatagttgaaacatattgtgataattgtaatggtgtataggtatcatattgaccaattgataaatctagataattacctggattatttgttaatggttcgatttgacctcttgtttcatttggtaaatctatccctgttttcacacctaagcctacttgatttaatcctcttcttagcttttgggcaggtgaacttatgtctgaaggtaaagccataccagaataataagggtctcccgctaattttaatgctgttttaaacatatatacgtttgatgaatgcatcaaagcttgcttatcattaatagttacatgcccgtttttattgaagtatgatcgttttgtcaaaccaccttggaaatgtaatggttcatcgaccattgtttctccaactttgatagctttattctgataaccggctaataatgttccaccttttacagaagatccaaccgcaaattgagaagtaaacgtaccaatgtcataatcagtcattttaccactcttattaatctgctttccggcaagcgcaagaatgtctccatttttaggattttgtacaaccatcattgcattatccatatctttggcaccttgactgcgaagcttcttaatttgtttatctaataatgcttctacttctttttgaagatctatatcgatcgttaatttcaaatcttgaccgcgagcgccaggatttaacacttctgaagatgtaactttaccagatttgtccgttgtgtatttcatttctttcttcttaccacgcaatacatcttcatattgatattctaggtaagattttccaacacgatcattgcgtgaatatcctttggataagtaatgttctgtcaattcttttggaataccttcagcaggtgtcgatacatctccgaatatacctcttaaagtatcgccatatggatattttctatcccaatccatagacgtgttaacacctggtaatttggaaagttgctgagaaactgctgcatactctttttcactgacatcttcattttttatcatttgtggatctaaaactgttcctgcattcatctctcgaaaaatagctaaaacttgtaaatctttagaagacaattcatctaattgtgattttccgattttcgataacagttgtttatcatattgatcttgtttaatacttccatctgctaacatagcttgttcttttgtcatcattgcttttgcttttttaggatgcaactgaatccagaaatctttcttatcacgttctgtaattttcttagtatccatcttgattagctttgataacttttcagccgtatccaacatttccgattgtgttgtttttcgacccctagtatatgtaatagccattttagaagcattatcaactaaaactttcccatttctgtctaaaatacgacctcttggcacagactcattcactgtaatgttttcatcattttttataatttgtttataatgtgagccttgtgcgatttgtaaataacctaaacgtagtactagtactgcaaaaataaatataatcacaccaaatataaagttaattctcttgttaattgtattttgaacgatttcatcatttgatttttcttttagtctttttaacaaaactacctacctctattcaaagtctttcactttaaatcatatatgaatttagaaattatttctatctttttgacaaaaaaataacggtctcatttaagagaccgaacaagtaatcatactttattttgttgcattatataattcgtcaactttttcccagttaactacattccaaaatgcgccaatgtagtcagggcgtttgttttgatattttaggtaataagcgtgttcccatacgtctaaacctaaaataggtgttttaccctcagttaatggattatcttggtttggtgtagtcacaatttctaactggccattgtttacgactaaccaagcccaacctgaaccaaagcgtgcagctgctttgtcagcaaattcttttttaaattcttctaaagaaccccattgttctttaattttttctactacagtacctttttcttctgagtttggtgaaagtaactcccagaataatgaatggtttaaatgtccaccgccattattacgtacagcagtttggatgttagctggtacactgtctaaattagcaacaatttcttcaatagatttagattctaaatctgtaccttctactgcagcatttaatttcgtaacatacgtgttatgatgtctgtcatggtgaatttccatagtttctttgtcaaaatgtggttctaatgcatcaaatgcgtatggtaattttggtaattcaaaagccataaataatcatcctcctaaaatgtctgtaagtaaataataacaagcagtgactggttcaacaaagaatttgcttaaattctactacttattattttctctactcatttaatataactcaaatcaaaaataattaaacattttgtatataaaaagttaacagatttgccataaaatcatacgaacggagtatgaaatgaacctttatcttctataatataaagaaatgagatttatgcatacatctgaccaaatgtgcataaatctcatttctttatattaatcttggcaagactcacatacaccataaacttcaagtttgtgtttgtgaatattaacaccaggtagtgataattttatctgatctattggacaataatctattacctttgtatctccacacttttcacagataaaatgatgatgatgatggtttgtacaagcgattctaaacttcatttcaccatcaagttctgtattttcaataattcctaaatctttaaataagtgcaggtttctatatattgtgtcgaatgaaattccaggataattttcatccataacttgttgtatatactttgcgtttatatacttatcttcttcgacaaaaatatctaacatatctttacgtttatctgtatattttaaaccgttctcttttaaaattttaatagcatcatttgtattcattgatattagctccctttttaaacttcattcgcattttctgataagccattgtaatcataagtaaaataacaagtagaactacaattacaccacccggagaaatgtccatatagaaagctaggactaagcctaatattactgataattcacctaaaaatacacttagtaatatcaattgcttaaaactttttgttattcgcatacttattgcaattggtaacgtgattaacgcacttactaacagtatccctacaacacgcattgaggcagaaataaccatcgctacaataacaataaataaaaattgaatccatttaggaatgccaatgactttactatattcctcatcaaatgacaatataaataattctttataaaacaatgtaataaacagaacaactatgatggcaatgacaataatcgttgttaaatcacttatattcactgcgcttattgagccaaatagcaatccaacaatttcttgattgaacccatcagctaatgaaatgaagattgcactcaaggcgataccagcactcattataattggaatagcaatttcttggtaagcagtgtatgacgttcttaatttttcaattagaagcgcacctactattgcgaataagattccaaaccacattggattaataaatactagtgttggcataatagtaagtaaaaacataccgaaagatataccacctaaagttacatgacttagagcatcagctataagtgatagtcgtctaacaacgataaaagcaccgattagaggcgcaataaaacctatcaagataccactaattaaagagtacctcataaaatcaaaattcaataatgcatctatcaattgtgacacgcctttccattttaaataaactcaaatctttattaattacaacattctcgattatgctgatgatcgacaaaacgtacaggatgtccataaatttttgaaatttcaacttcatcaagtgatttaaactcatcagttgtaccatggaaatgcaaatgcttatttaaacatgctacttcagtagcagtatctgctacaacaccgatatcatgagtaactaagataatggtgataccttcttgttttaattgatctaaagtattataaaattcacttacatgttttgcatcaataccattcgttggttcatcaagtactaatactgcaggttctgaaatcaatgctcgagcaatcattacacgttgttgttgaccacctgataattctgctatatttttatgaattaaatcacttatattcagtctttctagtactttaatcactttttcattatctttgctattaaatgtttggaaaagacgttttgtctttgttaatccgcttaaaacaacttctttaacacttgctgggaaacctgaattaaaggcatttgctttttgtgatacatagcttaatttaattgatgttttcttatttttaaaatcaataccttcaacaaaaatctcaccactttgtaaaggtaataaccctagaatcaacttcaataatgttgatttaccagcaccatttggtccaacaattgctaaaaattcacctttatttattttaatgtttatattttctaacacttttttatgatcatagtagtaattgacatttttcaattcaaagactggtgtcatcgtattctcacctcgcattcaactatacaactcctagtaacatatgtaaacagtaatgtttacgactcaaaattagacaaaataaagagatatgcccccttcaagttttatttatcgcatttcttgaagagagcattatcattttattgttgcataaccttattttttaattctgggtcaaattgctgttgttttaacatttcaatttcaagtttatatggcggttttttatttttcttatcttcaccaacataaggtgtttctaagattttcggaatatctttaaaactatcatgatgcacaatgtaatttaatgcatcaaaaccaatgtaaccgaagccaatattttcatgtcggtctttttgagcgccacggtcatttttagaatcattgacatgaacaactttgattctgtcgactccaatgattttatcaaattcatttaatacgccatcaaagtcctctttaacattatatccagcatcatgcgtatgacatgtatcaaaacatactgataaacgttcgttattatgaactccatcaataatacgtgctaactcttcaaatgagcgaccaatctctgtacctttacctgccatcgtttcaagcgcaatacgtacattattgtcattcgttaaaacttcatttaatccttcaataatcttattaattccggcatcaacaccagctccaacatgcgcacctggatgtaatacaatatctttagcccctatagcttgcgttctttcaatttcttgttgcaagaaatctacaccaagattaaacgtttctggtttggttgtatttgcaatattaatgatgtatggtgcatgaacaacaatattagataaaccatatttttccatcacttcatgacctttagttatatttaaatcttcaatacttttacggcgcgtgttttgaggtgcaccagtataaatcataaatgttgtttcaccatattcatgcgcttctatagcagaaccttctaacatctttttaccactcattgaaacatgtgatcctaataacataaaacacacctaaccttttttgttttgcttacgtttttgtctattttgctgcttactaaattgcttacgctcttgacgtttcattttttcaacttcttgtttaaatttcttcttataacctggtttaactttgtttttaattttacttcgaactttgttcttcacttgattagttaaatggtcatctttgcgcattcttgcttgacgctgattgtgcgctttaacttcttttaactcaccatctttaatatcaacagtattgaatacaaaaccgcgatcttctattaatgaaatattgtgttcttcatcaggactataaagcgtaattgctacacctttataattcccacgaccagttcgtccgactctatgcgtaaagaagtcaatatcatttggcacatcaaaattgatgacatgactaacaccttcaatatcaataccacgagatgctaaatcgctggcaataacgtattggaattctaaattacgtatacgtttcatttgttgtttacgttcacgtggcgttaagccaccatgaatcataccaactttaataccagcttcatttagtgaacgtgctaaatcatttgcattatctctactattacagaaaataatacataagtatggatttagtatatcaattaaatttaaagtcttttcaactttagctgcacctttagtaggtattaaatagaattcgatgttctttttattttgttttttactgtcgacagctacatattctggatgacttaaatatttatttaaaaatggttgtaactgttgtgggattgtagcactaaacaccgcaatatttgcattatcttccaatcttgcagcaatgtaatctacatcttcaattaatcctaagtcaatcataagatccgcttcatcaataactaaatatgatgctaagtgcacatgtaaatgtcccgttttagctaagtcattaattctagtaggggtgcctataatcaattgtggttgtgcattacaacgttgtctatctttctctatatctgtaccaccaataaaaactttaactgaaacaccagctttaaattggcttaaatggttcgctgcatcgtatagttgttgtgcaagttctcttgttggtgcaactacgattgcttgtggttcttttatttcactatcaattaactgcattaatggtaataaaaatgcatgagatttccctgtacccgtttgagattgaccaattaaatttgttctctttagtattcttggaataattcgattctgaatttcagttggtttttcaaaattaaggtctttcacagcgtcaattaaactagattctagattaaattgttcgaatggatgttttgccatgatttggcctccttatatgttcatctttactattataaagtataaatgtgctattttaaataaaaatattaaaacctcgaaatttcaaaatttagaaatcccgagattttagtttaaatatattgaaatggatctgtattaattgtagatgcttcaacatctaaatttattttttctgtattgaaccaattcattagtaacgcttttaaaccttctttcatcacatattcgctgtaatgattaatatcaattaaattcacaccatgaattttagcatctaaggcatcatgatgtttaatatcacctgtaacaaagacatctgcgccttgttggacagcttgatattcatatccaatacctgaaccaccaataattgcaatacgtttaattttctgattagactcaccaacaaaacggacacttgggatatttaatttagatttaatatcagctgcgaaatcttccaatgtcatttgattatccacttctgccataacgccaagtccataaagggatgtttgttttatctcaataaaatcaaataccggtgtttcatatggatggtattgtttaattaattgctcagcccttgacttttgatatgcatctatcataaattcaattttaacttcatctacatattcaattttatcaatttgtcctattgttggattagcttcaccaactggtttgaattgccctcttccttcactttcaaagaaacaatattcataattaccttcttgcgctaatccattttcactaagcttatctttaaatggtccaacattatccttaggtatatatgtttgaactttatagtatacatcttgttgattatttattattgaaatgttcttcaaacccatcgccttcgccaacatcatattgacaccatacggatttacatctaaatttgtatgcatcgctattaaattaatgtcatgttgaattagttttctaatgatcaaaccataaccattagcttttaatgatgttacgcctttaaagattagaggatgatgactaataatagtattataacctttttcgattgcttcatttactacttccaacgtacagtctaatgctgttaaaacaccagtaacttcaacatcttcatcacctattaacaatcctacattatcccaagattcagcagtactaaatggcacatgatgatctaacaatgtcattaaatcagctattttcattactataacaccctttcaattacagcaatttcgtcattaatttgagctaaacgttgatgatgttgttcagtattgagtttcgatttaatatgataaagtgcttctaactctctttgccatttttttataaaatattcatttttgttgttcagcaattttggtccgaatttcaattcatcagatgatagctctattaattctgtagaatattctgctacaacaatttcataaatatggcctttttcttccattattatttcatcaattatttcataattcaattgttgtaatgtttgtcttaaattttcagtttggatattactttgtaaaatcaaccttggatgttgacttaacttatcttgcccatcttttaaaattttagcaataagtggtccgcccataccacaaattgtgatattatcgattacgtcctcaggttgaataacacttaagccatcccctaaacgtacatcaattctatctactaattggtttgcagctacatttttcacagcagcttgaaaagggccttgaataacttctccagcaataccgcattcgcataaatggttttgaattgcatagattggcaaataagcatgatctgagccaatatccgcgattgtaccttgttttaaaaatcgacttaccgtcgttaatcggttatttaacgaaatcattttattctcctttatgaaaaaagaggttgaacattattcaatgtaccaacctcactcaagttaaatcttaatctaaaaataaataagcgcttattcatgtcttggtatcaatcattaaaattgatataaattaatccataaagtctttcaaacgtttactacgacttggatgtcttaattttctaagtgcttttgcttcaatttgtcgaatacgttcacgtgtaacaccgaaaactttaccaacttcttcaagtgttcttgttctgccgtcatcaagaccaaatcttaatcgtaatacattttcttctctatcagttaatgtatcaagcacatcttctaattgctcttttaataattcataagcagcatgatctgaaggactttgtgcttcctgatcctcaataaagtctcctaaatgactatcatcttcttcaccaattggtgtttctaatgaaacaggttcttgcgcaatttttaaaatttcacgaactttttctgctggtaaatccatttcttcaccaatttcttctggtgctggatctcgacctaagtcctgtaataattgacgttgaacacgaattaatttattaattgtttctaccatatgcacagggatacgaatcgtacgtgcttggtcagcaattgcacgagtgattgcttgtctaatccaccatgttgcatatgttgaaaacttaaatcctttgttaaagtcaaatttttcaacagctttaataagacccatattaccttcttggattaaatcaaggaataacataccacgacctacgtatcttttagcaatacttacaactaaacgtaagttcgcttctgcaagtcttgattttgctacttcatcaccttgttcaatacgtttggctaattcgatttcttcttgtgcacttaataagttaacacgcccaatttctttaaggtacatacgaactgggtcatttattttaacacctggaggggcactaagatcacttggattcagtttctcgtcagtatctgaactatctttttcattaactagtgaaatatcattatcatttaattgatcaaagaaatcatccatttgatcagagtcgatatcaaaattctgaagtttttcagcaatttcttcatgacttaaatgaccctcttttttacctttttcaattaattgcttcttaacatcttctaatgttaatgtcggatcaattgtttgttttttaattttaactgtgttatcagacatgaaacggcctcccgattttaaatatgaacattcgaaatttattcaatattgctattttaaactaaattcttaattaattcatccatatttttaattttattttacaaattggaactaatcccaatatttatttttcaatagtgttgtttaaatgcggtaactatcatttacccttatacattttgacataatcattattcgtattattctttaaaatcacatgctacatgcgttctttattcttagcaacaatttgctgtaaatagtatttttgtaattctacatcgccaatccttgtagcttcccttaatttatgattcaatgactcaattgtttcttgtcctttttcattaataacattgacataatcatcaatttcattttcatatggttcgtcattcaaattatattgttctaagctaattagtgtttctctcaactcatttgaattaacatactgcacagcatcactgatattatattgatcattttccgcataaaaatcatgtaagacttcgaatacatatttaaaatgctgatttgtgaagttatccttatcaacactttcataataatttaaaaatgtatctttatctctcattaaatgttttaaaaatgctcgctccgctttttcttgacggctcaaattgtcaaattgtgccataccaattggctcaggttcaatgtaaccgccatactcatcttctggataataattggctggtgcttgattgaattgtatttcgttagctaattgctcaggactaacattgaaaaatggtgcaacatcatttaaagccttttgttgcaaaatcgatgatttcataagcgaaatatcatgacttagttctttcaaataacgttcatatgaaaggtcattatgtgcaatttcatcttttaatatactcactttataatgtgcaaatgactttttgtcattttttacaaaagcagtaaatgcatcgttgccatacttaccaatgtattcatccggatccatgcctgatggcaattgtataacaaatacatttagcccttgctgtaacaaattttgacctgttttaagtgttgcttcactacccgcaaaatccccatcaaacattaatgttatatttgatgttaactttcgtataaaagtaatatgttcatctgacaactgtgtacccattgttgcaacaacgtttttcaagccagcagtatcagattttataacatccataaaaccttctagtaatacgatttcatctaattttctaattgatttacgcgctttatctaagttgtataacaactttcttttttgaaagataggtgtttcaggactatttaagtattttggttcttgaccggtatatgttcgacctgaatatccaacaattcttccttgcgcatttttcaaaggaaacataatacgatttcgaaatctatcgtaataactgaaattttcttcgttacgtgataataatccggcttcatatgctaattcaatatcgtaaccctttttttgaagaaaatcatgacaaaaatgtgagctatcgggtgcaaagccaatgcctcgctctttaataagcgcatctgtaaaaccacgttcttgtaagtacgttaatgcttgttcgccttcgactgtctttgttaaagcgtaataataaaattcttgtattaactcatgcatttcaatcatttgtaaatcatcagaagcaatttgaacatttgagttagattgtgttgcctcaatatctacagcaacattaactctatcacctaattctttaaccgcttcaacaaatgatatgtctttaatttcttgagtaaattgaaaaacattgccaccttttttacaaccaaaacaatgacaaatttgtttatcttcagaaactgtaaatgaaggtgtcttttcatcatgaaaaggacacaaacctatataattgcgtcctctcttttctaattttacatattcacttaccaagtctaaaatgtcggttttatcttttatttcattaatgatcgattgatctattcgcaaattaaatcacctattaagcattagttatactattatacctaattttcgacaaaaatgaaatcatttcgatttattttgttcaatataatggattatatcgtttgctgtttcttcgattgctttttgagaaacatcaatgacaggacatccaatttcacttacgatttcttcaaagtaattcaattcttcttgaattcgtgcttctgttgcatatcgagctgtgtcacctagtcctaattgttttagtcgctcttttctaatgcgatttaatttttcttcacttattttaagtgcgatacatttctttggattaatatcatataagccatctggcggtgtcacttctggtacaatcggtacattcataactttgtaactcttatgcgctaaatactgagataatggtgtctttgaagttctcgaaataccaagtaaaacaatatcagctttaggtaatcctttaggatctttaccatcatcatatttaactgcaaactctatcgcatcaattttcttgaaatatgcatcatctaatctatgaacgatacctggctcattataaggtttttcttcaaccgaagcagataataaatccattaatggccccatgatatcgacagacttcaattggaattctgctactttctcactcatatattgcttcatttcaggtttaataagtgtataaacaatgatagcatttgtatcttttgcaacttgaatcacttcatcaacatcttcaaaagattcaatatatggatatcttaataattcatttttacattgcttaggattgaattgtgaaatacctgccctagcaactaactctgccgtttcacctatagaatctgaagctacgataattttaattttttccattacttctcacctattctttatataatgctactaataacttagctattgttgttttggaaattcttccaattacttcatacttttgattatctttttttcttacaattggaatcgaatcaatttctttttcaatcattctatctgctgcgtatatgactaattcgctttcctctaaataagtgacattaggcatacgtgtcatatttacactgataggtactttatgaatatctgctccaatcattgaagctcttaataaatcttttcttgaacacacaccaacaaaatcgttatcttcattaataataaataatgtacttacatcttctaaaaaaattgtacaaatagcgtcataaactgttgtattctctcttagcacaacaggttgagacatatagtccttaacctcaaattgtcgaagtttttcattaaaaaatttgccttttgatttacctgaataataatatccaactcggggacgcgcttctaaaaaacctgacattgttaatatcgctaaatctggtctaagcgttgctcttgttaaattcaacttatctgctatttgttcaccagtaatgggtcctttagttttaacaatttcgatgattcgttcttgtctttgactgagttctataggtcttcaccccttttttattcacctattattataccgatatttctttcatgtcacaaacacattaattttacttgcctttaaataatctatcaattagaataaacgtacagcgagttaaggatagtgtaagcttaacaataagattggcgcaacgaatcattttaaaataaaagcgagtgactacactaatttgggtggaaccgcgggttaaatacgtaacttattttgtattatatacaatttaaaatattaactcgtcccatggaagtaaagcatatttactatgctgttattttccatggggcgttttcatgtatgaggagaggtaattatggcaaaagatatggatacaattgtttcattagcaaaacacagaggttttgtgttccctggtagtgatatttacggtggtttatcaaacacatgggattatggtcctttaggtgttgaattaaagaataatgttaaaaaagcttggtggcaaaaattcattacacaatcaccgtttaacgttggtatcgatgctgcaatcttaatgaatccaaaagtatgggaagcttcaggacacttaaacaacttcaacgacccaatgattgataataaagatagtaaaattcgatatcgcgctgataaattaattgaagattatatgcaagatgttaaaggtgatgaaaacttcattgccgatggtttaagttttgaacaaatgaaaaaaattattgacgatgaaggtattgtttgtcctgtaagtaaaactgctaactggactgaaattcgccaattcaatttaatgtttaaaacattccaaggtgtaactgaagattctacaaatgaaattttcttacgtcctgaaacagcacaaggtatttttgtaaactataaaaacgtgcaacgttcaatgcgtaaaaaattaccatttggtatcggtcaaattggtaaatcattccgtaatgaaatcactccaggtaacttcattttcagaacaagagaatttgaacaaatggaacttgaattcttctgtaaacctggagaagaaatcgaatggcaaaattattggaaaacttttgcaagtgactggttaacaagcttaaatatgagcagtgaaaatatgcgtttacgtgatcatgatgaagatgaattatctcattactcaaatgcaacaactgatattgaatataaattcccatttggttggggtgagttatggggtatcgcaagtcgtacagacttcgacttacgtaaacatgctgaacactctggtgaagatttcagataccatgatccagaaacgaacgaaaaatatattccatattgtatcgagccatcacttggtgcagatcgtgtaacattagctttcttatgtgatgcatatgatgaagaaggcgttgaaggtagtaaagatgcacgtacagttttacacttccatcctgcattagcaccatataaagcagcgattttacctttaagtaagaaattatctggcgaagcgattaagatttttgagcaattaagttctaaattctcaatcgatttcgatgaatcacaatctatcggtaaaagataccgtcgtcaagatgaaatcggtacaccttattgtgtaacattcgactttgattcattagaagataatcaagttacagtacgtgacagagattcaatggaacaagttcgtatgccaatctcagagttagaagctttcttaactgaaaaaacaaaattctaattaaaaagactttccaccatatgtggtggctatataatttataaaaagagatactggttagtaaaattgccagtatctcttttctattcaaaaaggtattcaaataaacacatctatgtggctacttgaataccttttattattttatgttattgttccaatctttttaattggttgattagtttctgacttttaaaaaacatacctgcatattcacgatataacattaaaatgatatctgacatttcatcaataatttcttgatggatattcaatgaattcattttatctatcggtaatttttgtaatacatctaataaatatagtgttttattcgataatataactgcatgtacatctttagaagcctcttgccttgaaatcgcaccgtcaaacttaaaactataacctattaaatctgcttgtgtgtcattaccactcacagcacagcgattaaatgatgcagtaaaaccaaatcgtttcatgcactttaacataactacgactgacattaactgtgcagatgtacctgattctattttttcaagaacaaattgtaataattgatagttatatggtgcaatgtcaccttcatccattgagcgctcaatagtttcagctgccagagcggcataactgcttacgtaaaggtccatttgtaatttataatgttgactaataacatctacagaatttaacgttcccatacctcgccactgattgtaaataaacaaaccataaacaaacaattgcgtttgcgcttgtaaacccgtcttaacttttttagcacgccttgccataagtggtacttttgcaccatgctcatttaaaatcgtgataattttatcagattcaccataatcaactgctttgatgataatccctttttggcgcattaacaattatcttcaccacttttaagattaatcttggtcttcaacataaccaatttggcgaataaagttaactttgtttcgccagtctctttgaactttgacccataattctaagtaaactttagagcctagaagcatttctatatcacgtctcgcacgttttcctacttcttttaactttttaccgccttttccaatgacaattcctttttgcgaatctctttcaacatatatagttgcttcgatatgaacacgatcttcgctttctttaaccatacggtccacattaacaccaatcgcatgagggatttcttcacttgtaagatgaaggattttttcacgaatgatttcacccactacaaattgttcaggatggtctgaaatttgatcatctggataatatttaggtccttcgggtaaatacgtctttaaaacatcaataaaatgatcgacatttagcccttctaatgctgaaataggtacaatctctgtaaagtccatataactttgatattcttcaatctttggcattaattcatctggatgcactaaatctattttatttaatactaaaaatactggtgtcttaacatttttcaacatttctataatatattcatcgcctcgtccaatttcctcattggcattaaccataaacatgattgcatctatctcagataatgtatttttagcgactttcatcatatagtcacctaatttgtgtttaggtttatgaatacctggcgtatcaatgaatataatttgcgcgtcatctcttgtcataacaccttgaattttatttctagttgtttgagctttatcggacatgattgctattttatggccgatcactctattaacaaatgttgactttcctacatttggtctacctataattgaaacaaatcctgatttatgttctgtcatttattctaaatcctttcctgaaaatccaaatggtagtaactctgcgactgtcatcataaccatatctcctttatgatttgtcatatacacaggcatatcatcatcacataattccttcaaaacttgacgacatgcaccacaaggtgatgacggtttatctgcatctacggttacagttattgattcaaaatcacctggtctgtatccttgagaaattgccgataccaaactagctcgttcagcacatatcgataatggataagaagcattttctacattggtaccataaaaagttctaccgtctttcgtttttaaataagcccctactttaaattgactgtatggcgaatatgattcttgttgtgcttttctaacttcttgaaaataatgaggttgataactcatatatgcctccctaaaataacgctataaaatgtggtaaaaatactattaaacctataataaatgctaatattgaaactataagtacactaaaagccgcaatatctttagcgtatttagctaaatcatgatattcaacggtcactaaatcgacaacatattcaatagcagtgtttaaagcttcaacagtgagaactaatgcaatagcaatgagtataaatatccactcaatccgattaatatttagtacgagaccaaagacaatagcaacaatcattgcaaacacatgtaaaagaaatttatagtctttttgaattaagattttcagcccatcaagtgcatatttaaaccttttcataattagtctcgtgttaatccatatgcgtttaatattgtatcttgtcgaccaaacatttccttttcatccgcttcagtcatatgatcataacctaatagatgcaaaaatccatgtaatgctaaaaatcctaattctcgttcaaaagaatgtccgtaattgtttgcttgttcttgcgctacatccgtacagataattatatcccctaaaacacgtggtatatcaagaccactaaaatcaatctctggctcatcttcttctaaagcaaatgagattacatctgtaactttatctttatctctatatgttcgattaatttcttgtatttcttgtttatctacaaatgtaacagaaagctcagcatcgtcttctatatgctcttcttttttagcaaattctaataaatcttcaatttgtttataccaagcatctttaactaagcctgtgtgatcgctaaaatctatcgtaaacatttaattctctccttcataatgttcaatgatcttacttaccaatggatgtctgactacatcgctctgatctaatttcaatatacttatacctttaacgttgtgtaacctactgaccgcttccttaagtccacttttaacacctttaggtaaatcgatttgagtttggtcaccagtaactaccatttttgagccaaaacctagtcttgttaaaaacattttcatttgcgcatgtgtcgtattctgcgcctcatcaagaattacaaatgcatcttctaatgttcgtccgcgcatatatgcaagtggcgctatttcgataatgcctctttcaataaatcgctctgtttgttcacgcccaagaacagtatatagaccatcatataaaggtcttaaatatggatctaccttttctttcaaatctcctggtaaaaatccaagtgactctcctgcttcaacagcaggtcttgttaatacaatacgtttaacagcacctttacggagttgctttgctgcataaactacagctaagaatgtcttacctgtaccagcaggacctataccaaatactaaatcattatttttcatggcattaacatatatacgttgccccatcgttttcgcacgaatcgtcttaccaaatgcatctttagttatctcttcatcatataaatctaacagatgttgaattgtgttattatgcgccattttaatagctgcttcaacatctttaattgtaatattattacctaaatcaataaccttcagcaaattgattaatactgattccgctttttctacgttttctatttttgtacctttaacggcaacttcttgtcctcttgcatggatgacaacatcgaaactctcttcaattgcttttaaatgttcatcattatttccaattaaagcttgagattggttcatatcgtctatttgtataattccaggcatacacgcgctccttttcatatatcatttatattcattctatgatgctttaatatctacttaattatatcatgcaattgattgatttaaacatctttgcattgacttactcatttttctttaatttaaaataatcatttatacttttcaccttgtcataaaagcagattcaattttagactaatcaattttttgctgtaatttaaataactaatatttctcgaaaaattctctttgttttttaatttttcttaacgtaaaaaaacaagcaactaccattacgatagtgcttgttttcaaaaaattttataattgttttggtttagctaaaatttctgaccatatcataccattgattacttcatctttatcaaattggaacgctgatttagtcaaatctttttcgacattttgagaattaagcagctgctttaatttcaaacgttttgtacgttcagataagtatttatcctcaataatatctctagcacgtttttccattttagcaatttgcttttctttttctctatcaatgtcagtacgaatcgttttaatatcatctctaagtgatttttctaattgacgtctaatttcgtcagaattatcttgtctagaaggtctatgtttctgctccaccggttctgctttaggcactgtgattggtttctctgtcatcggttttgtttcttgttgttttttaggtgccataggttctacaacaggtttcgatttaggctcttcctttggaagttcatcgaataaaggtggtaacgtatcatcatattttcgtttcgatgatttcttttcttcttcatttaattcttcacttatttctttaaacgttcgctcaatttcttcaaaaaagccacctttttttggttcattatcggtagatgttttttgaggtggcttttgattttgtctatctttatgactattttcgcgcatagtagtaatgatagaaatgatcactgatatgacaaaaattagaataccgacactcatttaatcacctctcgacttaatgttcaggtgactcatcatcactttgatcagttcgtttattaattgcatttctcatgcctgtatcagcttcgatatttttcaaattataataatctttaacactgatattacctgaacgtaatgcttcagccatagctaatggtacttcagattcggcttcaactactttagcatgcatttcttgtacacgcgctttcatttcttgctcagttgctacagccatagctctacgttcttcagcttttgcttgtgcaatatttttgtctgctaatgcttgttcagtttgtaagtctgcaccaatatttttactaatatcaacgtcagcaatatcaattgataaaatttcaaatgcagtacctgaatctaaacctttgcttaaaactgttttagaaatattatctgggttttcaagtacttctgtatgatgcttactagaaccaattgttgaaacgataccttcaccaacacgtgcgatgattgtttcttcaccagcaccaccaacaagtcgagcaatattagctctaactgtgatacgagctttggctttcacttcaataccgttcattgctacacctgcgataaatggtgtttcaatgactttaggattaacagacatttgaaccgcttctaatacgtcacgtcctgcaaggtcaattgcagcagcacgttcgaaaggaagatcaatgtcagcacgttgtgcagcaatattagcgtcaacaactctgtcaacatttcctcctgctagataatgcgattctaattggtttgttgttaatgctagtcctgctttgtgcgctttaattaatggcgctataacttttcttggagatacacgacgtaaacgcataccaaccaatgtacctataccaacatgaacgccagctgctaacgctgaaatccataaaccaatgggtacaaatgagaataaaataagtaatgcaactactataataactgctattacgataaaacttaaactaaacatggtatcgctccttttaattaatctacttccctcacaactactcttgttccttcaacttcaaggatttttaccgttttattgcgcaaaataaagttgccatctgaaacagcatcaatacgttcattttcacaaaaaataatccctgcaggtcgaagatctgtaactgtttgagcagtctttcctacgaggtgcgagcggttatcatgagaattgtaacctgactcagaattagttgaatcttttaagataactttatccaaaaacggaatctttctgttgaaaatcttcactaatatcacccattctacaatcgttaaaatcaaggcaacgataacattcgcaagcataaatagcaaattatcaccgagcgttgttatgcttatagttatcagtatcatgccaataataccaattactgcaccaactacaaataattcaattacaactaatataacgccaattgagaatattaagatagaatgcatattgacatttccttggattagaaatcccaaaaataaaataagtaatgataatgtggcgataataccagctgcattgatttttttagagtaaagttgatatacaaatcctaagaatgtcaaacaggttaatattaacgtaaaaataggttgaacaattatattgctaacttgttcaacccaagtatctccagccgttgattccaagatagttgtcatttgtaaaaaattattataactcacaatttcacctcgccctcacattaattatacatgaaattgaatatactttatagttataagaacctatagaatatcaatttgattatttataaactatataactttttttaattaaaaattgacaacaaaaaaacatcacatattagtgtcagacactaacttgtgatgtttgttttatataattaatattcgtgttgagggagtcaacagaggtattaattatttgaatttacgtttacgtgcagcttctgatttctttttacgttttacgcttggtttttcgtaaaattcacgtttacgtacttcttggattgttccacttttagaaactgaacgtttaaatctacgtaacgcatcttcaagtgattcatttttacgtactactgttttagacatctgtatttccctccctccaaatatcaacggaactttatagtcaattgcacagtaaaactatgcatttataagtataatatatctgtaatttatggtcaattagtaaattgttttttatttgaaacatatttcacatcaaaatcacaaagacttttagattttgttctaaaaatctcttaataatttatttaatgagaagagttgcttatatagtaaattgtgaagccgttaaaacaacgttacaaaacctatatctttaatacggaaccatatggtatgaatcaaggaatacttaaactaaaacttctctatcagatttatttgttgcgaaatcaacaactttaattgcttgcccttcatttaatggataatttgcttgcgtaattttaacttttacaatttgacctatgagtgattcgtcaccttcaaattgtactttcatataattatctgcatatccaactaatgtaccttctgtgtcaccctgttcctcaggaattacttcaagcacatcttgatcaaatttagacgcatataactttccgagttgattgcttagcgtaattaacttatgcacccgttcatttttaatttcttcatcaatttggtcatccattcttgcagctggcgtgccaattctaggagaataagggaaaacatgcagttcagagaacttatgctttacgataaaatcatatgtttcttggaactcagcttcagtttcacctgggaaaccaacaattacatcactcgtaactgccaagtctggtaaagctttatgcaattttgttaatcgttctgaaaatctatccattgtatacttacgtctcatacgttttaatactgtatctgaaccagattgtaatggaatatgcaaatgacgcacaacttttgttgaacgttctaaaacgtcaattacttcatctgtaagttgacttgcttcaattgaagaaattcgaattcgttctaatccattaatcgtttcaagatcacgtaataattgggccaagttataatcttttaaatcttgaccatatccacctgtatgaattcccgtcaatacaatttccttatatcctgaattcactagttgcgtcgcttgttcaactactttttccggatctcttgaacgcattaagccacgagcccatggaataatacagaatgtgcagaagttgttacaaccttcttgaatttttaatgacgcacgtgttctatctgtaaaataagggacatctaattcttcatatttacgatttttcatgatatttccaacaccattaattggttggcgttctttacggaattcgtcaatgtaacctaatagtttatgtctatcttgtgtaccaactactacatcgacaccaggaatttccataatttcagctgatgaagtttgcgcataacaacctgttacacagattacagcatcaggattttgtcttattgcacgtctaattatttgacgactttttttatcacccgtattcgttactgtacaagtattaataacaaatacatcagcattcgcttcaaagtcaacgcgctcatagtttgcttctttaaataattgccagattgcttcagtttcataatggtttactttacaacctaatgtgtgaaacgcaactgttgacataaatattcaccccattaattctttttcataacttattgcacttaacgcatacaatggcgcagtttctgcccgtaaaattctcggcccaagaccaacaactgtactagtattactaaataatgaaatttcattttctgacaaaccaccctcaggaccaaaaatcatcaacactttatcctgagcattgaattgttgtaaagtttgcttgaaattgcttaactcaccatcttttgcttcctcttcatatgcaataagaatatagtcataattatcaatagtatcacaaattaattttaaattcgactcgaattgaatagatggaatcactaaacgatagctttgttcagcagcttctttaattattttttgccaacgctctatctttttggcaacttttgcctcgtttaatttaacaattgaacgttccatgctcacagctataaatgatgaagcacccaattcagtagctttttgtagcaaccactcatatttgtcagctttgattagtccactgcaaatcgtaacatcaactggcaattctgtattaatattttgtttttcttttaaatcaacttcaattttatcacttgttatgtcagcaatttcacataaataaactgtttgatcattaaaagttaaaataattttactaccaacatcatatctcattacatttgttatatgatgaatatcttctttttttgtaataaaaaaacgctgacttacatcagcgttttggtctatgaaataacgttgcacattattcactcactttctggccaacaagacaaacccaaccgttgtcatgttgttctgaaataattttaaaacctacacgctccatatgtgactgtataccttcatacttctcttttataataccagaagtaataaaataaccgccttcatttagagtattataagcatcttcaatcatttcatcaataatatgcgctaaaatatttgctattacaatatcaaatttttctgtttcgtctttcaataagttacctggaacagcttcaattaacgtttcacaatgatttcttctgaagttttctttagctacactcactgccatttcatcaatatccaacgctttaatacgttttacaccgattagatgacttgcaatacttaatatacctgagccagtaccaacatcaattactgaatgctgtggcaatacatatgtttctattgccttcaaacacatacttgtagtcggatgatcacctgttccaaaagccatacctgggtcgagctcaatgcaaagctcttcatccgcttctttagcatatgtttcccaactaggaactattgtgaacttcttcgacgctcggaatggatggaaatagtttttccattcattttcccaatccgtctctgcaataatttgctcactgaattgaacgttatgttgatcaagttcatctaaatttaataactcatctttaatttgctgtcgcaacttatcatcataagtcatttcattaaaataggctttcaatcttactcccttatctggataatcctcttttttcaaagcgtaaatttcaccgtatttatcttctggttggttaattaaatcatctgaatcttctatcacgacaccatttgatccatgattttcaagtatattggtagccaattctactgcttcatgattaataataattgaaagctctgtccagttcatactttattctcccttaaagaatctttttgctctatctttaaaattcgaaggttgttcattaatttcttcaccatttaattgggcaaattctttcattagttctttttgtctatctgttaatttagtaggcgttactactttaatatcaacatataaatctccgtatccatagccatgaacattttttatacccttttcttttaagcggaattgcttacctgtttgtgtaccagcagggattgttaacataacttcattatttaatgttggtatttttatttcatcgcctaaagctgcttgtgggaagctaacatttaatttgtaataaatatcatcaccatcacgtttaaatgtttcagatggtttaactctaaatactacgtataaatcaccagcaggtcctccattcacgcctggagagccttcaccagctaatctaatttgttgttcattgtcgacaccttcaggtactttcacttctaatttaactgttttattttcagtaccttttccgtgacatgttggacaagcttcttcaaattcttgaccacttccattacatttaggacaaacttgttcagtacgaactctacctaaaattgtgttttgttctacagctacatgaccagcgccattacagtaactacaagtctttttacttgttccaggctttgcaccatcaccatgacatgtttcgcatgttacatctttacggattgaaatttcttttgttgtaccaaataccgcttcttcaaatgttaatgtcattgtatactgaagatcatcacctttttgcggtgcatttggatctctttgtctgccgccaccgaagaaagagctaaagatatcttcaaaaccgccgccaccgaagccactaaaaccgccaaagtcagagccattgaatccttgtccaccaaaaccttgtggaccatcatgtccaaattgatcatagcttgcgcgtttattatcatcacttaaaacttcataggcttcagaaatttctttaaacttttcatctgcaccttcttctttgttaatatctggatgatattttttcgaaagctttcgatacgcttttttgatttcatcttttgaagcatccttactaatgcctaaaacttcataataatctcttttggccacagctatctctccttttcttaattaactcatatagtttaacgtaatatgtcatactatccaaataaaaagccaaagccaatgttctattgactttgacttttcagatcatgacaacattctaattgtattgtttaattattttttgtcgtcgtcttttacttctttaaattcagcatcttctacagtactatcattgttttgaccagcattagcaccttgtgcttgttgttgctgttgagccgcttgctcatatacttttgctgataattcttgaatcactttttcaagttcttcttttttagatttaatatcttctatatcttgaccttctaaagcagttttaagagcgtcttttttctcttcagcagattttttatcttcttcaccgatattttcgcctaaatcagttaaagttttttcaacttggaatactagactgtcagcttcgtttcttaagtctacttcttcacgacgttttttatctgcttcagcgttaacttcagcatcttttaccatacggtcgatttcttcgtctgataatgaagaacttgattgaattgtaattctttgttctttatttgtacctaagtcttttgcagttacatttacaataccgtttttatcgatatcaaacgttacttcaatttgaggtttaccacgttcagctggtggaatatcagtcaattggaatctaccaagtgttttattatccgcagccattggacgttcaccttgtaatacgtgtacatctactgatggttgattatctactgctgttgaatagatttgagatttagatgtaggaatcgtagtgttacgttcaattaacgtattcatacgtccacctaaaatttcaatacctaaagatagtggtgttacgtctaataatactacgtctttaacgtcacctgtgataacgccaccttggattgcagctcccattgccactacttcgtccgggtttactcctttgttaggctctttaccgatttcttttttgacagcttcttgtactgctggaatacgagttgatccaccaactaagataacttcatcgatatctgagtttgttaagccagcgtctttcattgcttggcgtgtaggttccattgttcttctaattaatgaatctgataattcttcaaatttagaacgagttaagtttacttctaagtgtaatggaccgttttcaccagctgagataaatggtaatgagatttgagtttgtgatacacctgataagtcttttttagctttttcagcagcatctttcaaacgttgtaatgccattttatcttgagataagtctacgccattttcttttttgaattctgcaactaggtagtcaataattacttggtcaaaatcatcaccgccaagtttgttgtcaccggctgttgatagtacttcgaatacaccgtcacctaattctaggatagatacgtcaaatgtaccgccacctaagtcaaaaacaagaactttttcatctttatcagttttgtctaaaccatatgctaatgctgcagctgttggttcattaatgatacgctcaacttctaaaccagcaattttaccagcatctttagttgcttgacgttcagcatcgttaaagtatgcaggtactgtaattacagctttgtcaactttctcacctaaatagctttcagctgtattttttaagttttgtaaaatcatagctgagatttcttgtggtgtgtatgatttaccttcaatatctactttataatcagtacccatatgacgtttaatagattgaacagtgtttgggtttgtaatagcttgacgttttgctacttcaccaacttgagtttctccatttttgaaagctacaacagatggtgttgtacgtgaaccttcagggttttgaattacttttggctcatcgccttctaatactgttacacatgaatttgttgtacctaagtctataccaataattttactcataataaaattcctccatttaatcattaaattaatttaattttaaacaatgtcttttcgccaaatttaagttattggtttactttgaccattgatggtcttaatactctatctttaagcttgtatcctttttgtagttcttgagtgatttcgccagattcaaaatcagggttatcatcttgaactacagcttggtgaatatttggatcaaatgcttcaccttcagttttaataacttcaagaccattatcttttagtgcgttaatcaaactttcatgcaccatttgtacacctttttgaagagatttaaaagtctcatcatcaccttcaatttgaagtgcacgttctatattgtctattgctggtaaaatatctgttaacacacgttgtgcttgatatgttttgtttatttcattttctttttgaattctacgcttataattttcaaactcagcgtagagccttaaatatttctcttcgttttcatctgctaattgttgaagttcattaattttttgatcttttggatctatttcttcaataacattctcgtcagacgtttcttctattgcttcatcttgtaaatgacctttactttcttcagcttgttcaactgaatcatcaatattttgtttgacgtttgtttcttcaactgttgattcagtgtttttttcaactgattcgtctttatttgtcattttctgtcctccaatactttctaatccatcattaccaaattctatttaataattgaatgacattttgataatgcatagctgtaggtccaatcacagcgatttgaccttttaacgtttcatcaaaatgatattgacttgttacaattgaaatatcacttaagctgtcatcaatttcattaccaatttttacattaatatttggtgaagatatatcttgtaataattctgcaattctatttgattctatatattgtagaatgggctgaattgaagatacattactttcattcaatgcatcaataagtttaacctttccacccatataaatgctattactttgattagaaatatgattattcatcgtatttaacaatttattgataaaaatttcttcctgctctgattgaacaaaagagacaatatcatcttgtaaattctgattaaactcagttagtttgtttgtaacaaaatttgatattgtatttagtttgtcattattaaacggtatgtctgaagcaagatgtacatgctcaacatgacctgatgaaaatacgataaccattataactaaattaggattagcacgaatcaagtgtacattattgataatatcttgtttatgattaggatgaacaactaaagttgtatattgagatatatttgataattcatctgcaaaatatgtcaatgctgatgatacatcatattgattctcaactaacaattgatttaatcgtcttaatttatttgttttttgatgagatgtttgttcaagtaaacgattgacataatacctaaaacctaattgtgatggcgaacgccctgaagaactatgtgtcttctcgatatagtttaaatcttcaagctgtttcatctcatttctaattgtagcaggactaacattcaagttatgtcgctcaattagtgttttagaaccaacgggttgtccaaaatcaacataatcctcaacaattgcgtttaatatactcaattgcctatctgtaatcatgttttcacctcattagcactcacttatctcaagtgctaattataatttatcaaattggtcaaagtaagtcaatgttaaagactcgaaatttcaatttttttaatcatttattaggaaagcttcaaaaacctcattacctatgactttccctctatttgtaagtgcaatcacatcgttcttttctacaattaattccttctcttttaaattatttattgtttgaccaaagacactttcaatagattggtcaaacttctttttgaacctactactactcacaccttcatttaaacgcaacccaagaaacatttcttcttccattctctcagtcaaagaaggtttatttgatactaaaattgctttactttctttatttatagctttgatataatgattcactggattgatattcgtataacgcacaccatctacataaccacttgcacctgctccaaatccataatattcctcattaaaccagtaaaccttattatgttctgattcatggccatctaatgcaaaattagatatttcgtattgatggaaaggagattgttctatcttagacatcagcaactgatacatgtcagcacctaaatcctcattaggaagtttgagcaagccttttctatacatattataaaattgggttttaggttcaagtattaagccgtaactcgaaatatgttgaatatccatatctaaagctagatctaaactttgttcaaaatcttcaatcgtctgtttcggtaaatgatacattaaatctaaactgattgatttaatacctgcgtttttagcatttaacaccgaagtgtaaatatcttcagtattgtgcgttctacctaaaacagacaataactccggcttgaatgtttgaacgcccattgaaatcctttttactccatatttctctaatagttggactttctctttagttaactcatcaggatttgcttcaaatgtatactcgcctgtgattgtaaacgtatcacgtattgctttaagtaatctttccaactgattaatagaaagggccgttggtgtgccgccacctacatacatggtctttaagatcctatattttgctgtagacatttctgtgattagtgcatctaagtactcatctacaggttgattctgtataaaatatttattgaaatcacaatatgtacatattcttacacaaaatggaatatgtatatatgcactttgtaccgtcattttaatgccccgcttctcagactttttatccaatcggctatatcctgttggactatctgcaattattcttacttttaactttaacgtttaatcaatgattgtctaatatatcgattcattttaatatttattcttgtttagagggagtgagatagaaataataaagaaccactaatgatttattatgtagtggctcttacacattagccagatgtaatatgtccttaaaaataaaattacatgagtaaaactcatgcataagggagtgggacagaaatgatattttcgcaaaatttatttcgtcgtcccaccccaacttgcattgcctgtagaatttcttttcgaaattctctatgttggggccccaccccaacttgcacattatagtaagctgacttttcgtcagcttctgtgttggggccccattgttataagctcattttaactctgtcgatggctgccaatataacattgtaaagcccaggacgttaatttatcctaggctccctctttttagttattaaactttattcattgtaaattgttaattgattttttaaaattattcatcatccattttcaatacagccaagaaagcatcttgtggaatttcaacattaccaactgctttcatcttagctttacctgctttttgtttttcaagtaatttacgtttacggcttatgtcaccgccataacatttagctaaaacgtttttacccattgatttaatatttgtacgcgctacaattttttgtcctattgcagcctgtacaggtacttcaaattgctgtcttggaattaacgttttaagtttttcaactaatgctttaccacgttcatatgcaaaatctctatgaactatgaagcttagcgcatccactttatcaccatttaataaaatatccatcttgactaaattactttctttattttcgatgaattcataatcaaatgatgcatatcctttagtattagatttaagttgatcgaagaaatcaaatacaacttcagctaaaggtaattcataaacaatatttacacgaatatcatctaaatagtccatatttataaattgtccacgtttacgttgacataattccattactgcaccgacatagtcatttggaaccatcatagttgcacgaacatatggctcaaatattttatcaattttatcacgatctggcatttgtgctgggttatcaaccgtcacttctgaaccgtcccttaaaacacattgataaattacagatggtgcagttgcaattaattcaataccaaattctctttcaattctttcttgaattatttccatgtgtaacatacctaagaaaccagttctataaccaaaacctaatgcttgtgacgattcaggctcaaattctaatgatgcatcattcaattgtaatttttctaatgcttctcttaaatcattataatttttgttatctattgggaacagtccgcaatataccattggattcattttcttataaccttgcaatggttctgatgcaggtctactagctaatgtgatggtgtcaccaaccctagaatcatcaacatttttaatacttgcaataatataaccaacatcaccaactgttaattcatcaactggaagctgcttaggtgtattaattccaacttctgttacttcgaactctttaccagtggccatcattcgaattttatctccggctttaacaacaccgtccacaattcttatcgatgaaattacccctctatatggatcatactcagaatcaaatattaacgcttttagtggtgcttctgggtcaccatctggagctggcacaacttcaactattttctctagtatctcttcaattccaatgttagatttagcacttgctaaaacaacatcgtcttggtctaaacctatcatatcttcaatttcttgtttcacgcgttcaggttctgcagcaggtaaatcaattttgttaataacaggcaataactctaactcattatctaatgctaaataaacatttgctaatgtttgtgcttcgataccttgagccgcatctactactaaaatcgcgccctcacaagctgccaaagaacgtgacacttcatatgtaaaatcgacgtgtccaggcgtatcgattaaatggaatgtataagtatttccatctttagcttcgtactttaaacgtactgcgtttaatttgattgtaataccacgttctctttctaaatccattgaatctagtaactgatcttgcatatctcttgtttcaactgatttggtattttctaaaattctatcagccaatgtagattttccgtggtcaatatgtgctataatcgagaaattccttatattctctcttctttttaagcgttgctcattatccattttatccttctcactttcataaaataaacccgtattatctttcgcatctttgatataataacgtttttaataggtaaatgcaaacgccataatcttggatgaactttgaaattataacaatctttatttaaatacatacttgcgatatgttaatatgttaattacgtacttataattataaaacgtattgattgtgtttccaacacaatttattaaatctgcaaaattttaagctaaccccatcaaataaatgattgcacaacggttagacttttgttaaaatatttcttgttgtaatcaaataaaattttgataagatgaactcacttttaggaggtgacagaaatggcaaatatcaaatctgcaattaaacgtgtaaaaacaactgaaaaagctgaagcacgcaacatttcacaaaagagtgcaatgcgtacagcagttaaaaacgctaaaacagctgtttcaaataacgctgataataaaaatgaattagtaagcttagcagttaagttagtagacaaagctgctcaaagtaatttaatacattcaaacaaagctgaccgtattaaatcacaattaatgactgcaaataaataatctttttaaataaaagttcaagcgcatgcttgaacttttattttttataaagatagaatgaataattccagtattaactgtttatccatatatgatgatttaagtttataatcagtttccgcacaagcatctataatattcaataattcatcaagttgataatgtcttacttgtcctaacgctaattttactctgtatggatgtactcctattgttttagcaatttgctgtccactatatcctttttgactcagaatcttacattgataaaataatcggtaattacttgtaattagtgcaagtaatttaattggttcttctttcatagttattaaatcttttactaaatgaattgcttgttctttctttcttttctgaatgtattcagtcagtaaaaatacattttgctctaaacttctattaataatttggttaacatcctgcttattaattgttggtctatcgcctaaaaataaaatcaacttttctatctcttgtgagacaatattaaagttaatacctgtcaactcaataaataaatctaatgcatctcttttgatatctttgaaattctcatttaatttactttgaatccatttttttatttcttcttcagacatttgctctatttttttaagccttgcatgcttttttagagttttagttaacttttttctttcatcaagtttattttgatatatctcaaagacaatcaaattttcgccatcatatttttcaataaattctattaattgatctacattatgagccatatcttttggcgctttttcacctgtaaatatatatgcatttttaaccaaaattgcttttttatctgaaaagaaaggcaatgttaatgtttcttcaacaattggtgcaatctctgtttcgtataaattatatttcacaaagttaaagtcatctctatcacttttcaaaaattgtgatatgatttctgcactttgtttttcaaccaattcaggcacatctccataaatagctacaatattgtcgctcattcattacaccctttcattcgtttgacacatcaatagattatatcatgtttctgtatctataaaccacttgcatttccataagagcttgaatcaacttttaaattatcatctaagtcaattgtaacttgaccgttttgttgactattgtaaatgcgactgcgaatcctttgcaatcgtttaacaacttctatattaggaagatgatacatattgttcttcccagaagaaatcaaacttattttaggcttaatcatctctataaattctttagaactacttgtcttgctcccatgatgtcctacttttaaaatatcaatctccggcaagttatatttttttagtagtaaagattcattatttttactagcatcgcccattaataaaacttttttattttgatatgtaatcatagtaataatcgaatactcatttttatctcggctatttggaataaaactatcaaaaaatagaaaactactatctccaagtttaaaactactaacttgtcttacatccataagtttaatgttgtacttatggcttaatttcgataataacatcaatgtattactactatatcccttattgtatatcactatatgtttaattttaatatgactaataatatattccacttcaccaatatggtcattgtgtggatgtgttaaaattagatactctaattcatttatccctctttcatttagcgttggtaaaatatgatatttagaaattgaataactaggttgtttagtatcatcaatcactttcccacctgtatcaatcaagacattttggttcttaccgccttcatataaaatactgtctccctgccccacatttaacattgtaattttgtgatgtgaatttgttggaaacgttattaataatgtcagaataattatagtccaaaacgtaaccaatatatatttacgtttagccaataaccaaaatatgtaataaacagaaattataaatactataaatatccaatcattaaacttgggaacagaaaaatgtgattgcttgattcttgtgaataggtctagtaaccagtcatgaaaattaaaacttaggtcaaccaagtaatttagcggcgttaatcccacaataaaatgacttgtaataaagaataaaatagatagcggaaacaatataatcgaatagtacggtacaaaaatcaaattagataaaaatcccacccattgaagttgatgaaagcttggaatggcaacgataaatgaagctaattgtgcaataaacgtaattatgaataatgattgtaactttgacaattgctgtaaaaaaggaaaaagtagcataataaaaaatgaaatgatgaatgaaaattgaaatccaatatcataaacaactagtggatttaaaataaacataattataaatgcaaatgctaatagctgaatactctttattttaatttgcttagtaataaccagtacaagagttgtcattattatagctcttacagcactaggtgcataatttgtgtattgagcaaataaagctaatacaatgattgtaattcctttaatgacaaataaaggtaaatttaatcgttttaaaggttggtaaattaaaaatacaattgcagctatatgcgagccactaactgccagcaaatgatatataactatctctttaacacgttccttaaattgctcattaacttcttttacgtcaccagtaatcaatgccataatacgatccggaaacttaatacccgaatcataaattcgattcattataaactgtttatgtttctcaattaaattagaccggttcgattctaggcagctttgtacaactatactttgtaatttaagagttacaaacttattgtcattaactttgaattgtcctttaacaatacaattacgactttcaattttctttaaatcaaaattctttttatctgttaaaaagaaaggatatatttcattttttaaactcaacctacctttatatgtgtcactaccttgacgttgaatttggattacttgagcacgctcattaaactgagaattacgttcaatataattgatataattaaatattgcttgttgtgaataatgtaaataccatgcggagaaaatgattaaaaagagagaaataggggcataaacgattttatttttacgataagtaatatacaaaagtaaaatgaaaagaaatgtagagagcactttgctagaattccaaagcactcctacaatcattgataacgcgacaaacagcaaaacattaacctttagtcagatatttagcaacatattctggtgaaaatggaatttttttaaattcaataccagattgtttgagtaatttagttgcatattcatggttatgataatcttctgcatagtagatacgctttatacctgcttgaataattgactttgtacaatttaggcatggaaaatgagtaacatagattgttgcaccttcagtagatacaccttgttttgcacattgtaataaagcattcatttctgcatgtatcgttctgatacaatgtccatcttcaattaaacatccttcatctatacaatgcacctcgccagctacagagccattataaccaccagcaataatacgattatccttaacaatcgttgcacctacagataatctttgacaagttgaacgtaatgctagcaaatgactttgtgccataaaatattcttcccatttgattctttccaagatgttcaccttccatacttaaaatttagtaacattttctaataatataagattaatcacaaaaaataaaatttgcaattaaaataatccattatgtcgtgaaataagatttcagtttatcaaaagttttacttccaaaaccttttacttttttcaaatcgtcaatttcttgaaatgcaccttgttggttgcgatattcaacaattgcattagctttagcttgcccaactccaggaacagacatcaattctgatacagatgccgtatttaaatttactttagtattatttgtgttcccatttttttcgtgcacactgtttacttcaatttgtggttcaacattcttttgtcctttatgaggtatgaaaatcattttttgatctgttaatttttcagacaaattaatttgacttacatctgcatcctccaataattgtgctttatcaagtaaatcaactactctatccttagatgtcattttataaacattaggatgtttaacagcaccttttacatcgacatatacaggacccttatttttggaattatctccatctttgacctggacatcttctactttggacaaactactattttcactagtgctttgtttcagagcagtatctttattttcaaaatttcttgaagtataatcatcttgtctccagaatataaaaccaattaataccataattaaaacaacagcacttagaatatataacttccattgagttaaaaaatctttatagcgtaataaaaattgatacaataaaaccactcctcaactttatacacgtctgagcgagtggttttacttttattttttcgcaatgaaaaacaatctttctgcatcttcattatgttcatctatattaaaatcagtaaatgtttcaacatgtttaaaaccaacttgagctaaccaagacaaatatgtcttttcatcaaatgttctctgaaaatgagactcatcaaatcttgaatatgtttcatcttcatgtcgaatgaaaaatgtcatatcatgataaacacttaaaggtaaatctccttgcacagcatcccatgctaaaaaaatgtcccctttatcatcaatataactttgattattaaacaaagtcatcattttataaacagtatgtacatcaaaaataaatacacctgaatcagtcagatgatgataaacattgatgaatgtttcaatcactgcagtttcatcttgcaaataatttagagagtcacaaaaaatagtgatgatatcaaattgttgttgcaaatcaaaagatgtcatatctccttcaagccaatttacatttgctgatttttgagctgcaacagtcaacatatcaacacttaaatccataccagtaacattacctaaagcttctaattgaactgttaaactaccagtaccgcatccaatatctaaaatatttgattcatctttgcagtgattttttacaatttcaaaccatttttcatatggttgatcttgagtcaattgatcgtacactaggctcatttctgcatattgcgacataattaatacgcaacctgactatatgattctaatggtgcatcttgatataacttttcaatattataataatttctttcgtctttatggaaaacatgtaccacaacatcagctaagtcaattaatatccaacgcgcttcattgtatccttccatacgttttacttctatattttgttcattggctacttctttcaccgctctagcaatcgcttgaacttgtcgttcattatttccgtgcgttacaacaaaataatctgtcatatcgctgatacctttcatttctaaagaaatcgtatcttcgccttttttattgtcaattgcatccacagcaattgctaataattcttgtgaattcatttaatcatcctttattctttcgtcactatagttataataatttaaacagtcaatcgtcttattatataccgtaatatctttctgtattaaaaatagtactgtgcgtttagaaatttcataaattgtcttatctaaactaccttgattgtatgccatatctcgaatatcatcaactcctgggattgttcttccaggttcgatgtaatctgcaataaaaatcagtttttcagtttttgtcatttgttgacgtccagtagtatggtatttgatagccattaatacttcctcatcattgataccatattcatgttccatgattgctgcacacacagggccatgcaatatttcactaccataactcagtagatcattacctaattcgtattgtcgaacaatttgatacattttacctaaatcatcatatttacagaaatcatgtaatacacctgctaattctactttactagtgtctccatcataaatttctgccaatttaatcgctgtttctgcaactcttaaagaatgattataacgtttctctggcagtttctcttttgcaagccgttttgctttttcaatgttcatataatccttcccccttaatatagttttcaacggatttaggaacaagaacttggatagatttcccttcactaactctttgtcgaatcattgtcgaacttatatctaccctaggtatctgaattgcaatcatagcattttcaacattttgactatttttgtctcgatttacaactacaaaagtaaccatttcttttaagtattcaatttgataccatttctctagttggttatactgatccgtcccaataacaaagtacaactcactgtctttgtgttgctccttgaatgccttgatcgtgtcataggtataactttgaccaccacgtttaatttcatcgtcacaaatatctccaaaaccaagctcgtcgataatcatctgtatcattgttaatctgtgctgaacgtctataaaatcatggtgctttttcaatggagacataaaactaggtaaaaaataaaattcatctggctgtaattcatgaaatacttcgctagctactatcatatgtgcagtatggatagggttaaactgaccgccgtaaagtactatctttttcattattatggcaattcaatttctttattatctttagattctctataaatcactatcatagatccaatcacttgcactaattcactatgagtagcttcgcttaatgtttcagctaattcttttttatcatcaaagttattttgtagtacatgtactttaatcaattctctgttttctaacgtatcatctatttgtttaatcatattttcgttgataccgccttttccaatttgaaaaatcggatcaatattgtgtgctaaacttcttaagtatcttttttgtttgccagtaagcatatgttattctccttttaattgttgtaaaactgctgttttcatagaattaatatcagcatctttattagtccaaattttaaagctttccgcaccctggtaaacaaacatatctaagccattataaatatggtttcccttgcgctctgcttcctctaaaataggtgttttatacggtatataaacaatatcactcattaaagtattgggagaaagatgctttaaattaataatactttcgttatttccagccatacccgctggtgttgtattaataacgatatcgaattcagctaaatacttttcagcatctgctaatgaaatttggtttatatttaaattccaagattcaaaacgagccatcgttctattcgcaacagttaatttgggctttacaaattttgctaattcataagcaatacctttacttgcaccacctgcgcccaaaattaaaatgtatgcattttctaaatctggataaacgctgtgcaatcctttaacataaccaataccatctgtattataccctatccacttgccatcttttatcaaaacagtgttaactgcacctgcattaatcgcttgttcatcaacataatctaaatacggtatgatacgttctttatgaggaattgtgatattaaagccttctaattcttttttcgaaataatttctttaattaaatgaaaatcttcaattggaatatttaaagcttcataagtatcatctaatcctaaagaattaaaatttgctctatgcataacgggcgacaaggaatgtgaaataggatttcctataactgcaaatttcatttttttaatcaccttataaaatagaatttcttaatacaacatcaacatttttaggaacacgaacgattactttagcccctggtcctatagttataaagcctagaccagagatcataacatcgcgtttctctttgcctgtttcaagtctaacagcctttacctcattaagatcaaaattttgtggatttccaggtggcgttaataaatcgccaagttgattacgccataaatcattagccttctccgttttagtacgatgtatattcaagtcattagaaaagaaacaaactaacggacgtttaccacctgatacataatctatgcgcgctagaccgccgaagaataatgtctgcgcctcatttaattgatatacgcgttgttttatttctttcttaggcataataattttcaattctttttcactaactaaatgcgtcatttggtgatcttgaataatacctggtgtatcatacataaatgatgtttcatctaaaggaatatctatcatatctaaagttgttccagggaatcttgaagttgttactacatctttttcaccaacactagcttcaatcagtttattaatcaatgtagatttcccaacattcgttgtccctacaatatacacatcttcattttctcgaatattcgcaattgatgataataagtcgtctatgccccagcctttttcagctgaaattaatacgacatcgtcagcttccaaaccatattttcttgctgttcgttttaaccattctttaactcgacgtttattaatttgtttcggcaataaatccaatttatttgctgctaaaatgatttttttgtttccgacaatacgtttaactgcattaataaatgatccttcaaagtcaaatacatccacgacattgacgacaataccctttttatccgcaagtcctgataataattttaaaaagtcttcactttctaatcctacatcttgaacttcgttataatttttcaagcggaaacaacgtctgcaaatcacgtcatcacgaaacatattatgctctggtacaaaaccaggtttatttttatcttcagattgaagtggcgcaccacaaccgatacattttaaaatgtcagacaatcaattttcctcccatgtgatataaccttttttactgaaatgacgtaataatcgcctttcaattaatctattaaacttagtaataaagccatcagttcgtttaactggaacaaccataattgtatatagacctcgacgattaccaccaaatacatcagtaagcatttggtcacctataacaacagtttgatctggtctgatattcatcttagttattgctttatcaaacgctttccccattggctttctcgctttaaaaataaaatcgatgtctaaatgctgactaaaactagcaacacgagactcattattattagacacgattgtaatagtgattcctttttcattagcttccttaaaccatgctttaacacgttctgtaggttctttaacatcccaacctactagcgtattatctaaatctgtaataatacctttaacgcctttgtccactaacttgtctaaatcaatttgaaatattgattgaacatatgaattcggcataaaaaacttgcgaactaaacccatttaactcacctttacctttttataattgagacactaatgcttcaacagtttgacttgatgatacagctgctttttctaaaaatgcttcgaagctcatttccgcttctccatttgctaagtctgaaactgcacgaactacaacaaatggtacattaaattgataacatgtttgtgcaattgcagttgcttccatttcaaccgccatcgcatttggaaatgcttttttaattttttggcgttgttcaacactaccgataaagctatcaccacttacaattaagcctactttagctgttaattgttgttgttgtacaacttgagatactttttctattaaaggtttacttgattgaaatgctaccggcatctgtggtatttgtccatattcataaccaaatgctgttgcgtctgcatcatgatattttacatcatcacttataagaacgtcacctacatttaaactttcatctaaagctccagcagaacctgtattaataatgacgtccggtttaaacttattaattaataatgtcgtagaaattgcagcattaacttttccaatgccactttgggtaatcactacttctctatcttttaaaatgccagtataaaatttaacatgtgcaactgaaatttcgcttaattgtgttaatttattttttaatattgttacttcttcttccatggcaccaattataccaatcatcttttgattcacctcttttaaaaaatcctagcatttgttattttatcacattttaatcactacaacgacaagtatcatgattttcattactgtataaaacttttgctttatttttataaaaagctctttcaataacttggtatcataaataattatttttgaactcataacagtgaattcgatgcttctaatttgtctatttttcaaaaactaatcatatcaattacatcaaccaatcgtgtcaagaaactttattaaataacaggaaaatgatatgtttaaaataataatgatgaaataagaggattttacaatggctgaaaataatcaaaatagtctcgtaacaaagatagctacatacggcagttttattgcaattgcgtcgtttgtcattttatttataagtatatttttaaagttttcatttaatatcgagtttacagcaacaattatgaacatatgtcgctacactctaattctaggatttatacttatgtccttacctgatgttgttgataaaaacatcaagaaaattatattcgatgcatttattatcatcgtctttatcttctttttactatagtagttttattttgtaattacacagttaatcatatttgtttcgtatcgaattcctttgtgcattaaagataattctaatagaaaacagcagtaagacttttctaagtgttagcatccttactgctgtttttatttgtaacaacataatgacaggtactttatatttcactgtcaaagattattaatgattaacttaattaaattatgatttgaataaatagatatctaaatgcaatttgtcactattgatagttttattatcagcatacatttttaatacctcacgaccatactcaccatttaaattataaaaatcatattctacattttgttcatcatcattataatatttaacataccctttaacaatgtcgccaccttgttcgtacaacttatacttctcattcaaataatttcttaattgaacctctaattcttgaatagtaacaattttctttttcgtttttactgcagttagttctatttctgtttgatgtccgtcaatccataaattacaaggtatattcttataatcatcgtatttattattgtcacttaaagtaacaccaccataactacattgcgttttattggttgctcccccatgacatccgtatccataatttccagcaaatatatcgatatccttatttataaatttctttgaaagtgcctcattttcaaattcaactttaaaatcctttttccaatcatcatttacgaacatgtcatgaaataacaaatcatgcttcaacagtctatcgtttgtgtttttattttcaagctgagttggattgatgaatgacatcttagcattacttagacgctttgaatcaaacttacttttatgatgtaagtctgaatattcgattgcactcgctgaatttgtaaaaattccttctaacaataatattaaaataaatcctgttaaatatttaacttcaaactcccccaaaacaattattaatttacatttgagagcgagacataaatgataaagaaccgcttatggtttattatgtagtggttcttgagcctacaattttgattatgtatcacgctcataatacttttcaatttgaaatactctgttcgcaattattagttgagttatatcaaccaatacagtgtatacctaaaaattccaaaccgtttaacagtatataagaaaaaatgataatcatttcttttatttttattaaatttcataatgattcatataatattctcattaaaacatcacaatactgatacacaacaaaaagagcagtacatttgtcatgcaccactctcaacaaatatattttttcaatgaagcaattacgcgatcttacaaatactataagtatagctgatcacatattatatttattttataatcgaatttagaaattcatcacttatctcataaattgttggtctacttttaattttaactaagtagttatcatattttttaattgtattattaatttttactcttcctactcccaatatgttttctaaatcaattaatgttaatctatttcttttatttccaaacaatttatccattgaaaggagatacaaaaattcataatctatctgtttataatgactagttaaataaagcgttaatttttcagtcgcatccatttttggtattaactcatcaagtattctttcttgtcctgctatcaatagctcaagcattgtgtcaataaattccgtcaaatcaccacaattcaaatgatttgaagcagtcataaacgccttgtaatatttcgatttatttctatttataacatatgaaaatgtcaaagcagtataattatcataataatcactcaagagcttggcaattataaatcttccaactctaccattgccatcataaaaaggatgtatatattcaaacagataatgactagccatgattttgaacggctgaggcgcatcaaaatattttaaaaatgttagcatttcacctataaattcaacaattttggtttcaggttgtaacccaacatgtatatatttattcgttgacccatcatgcacaccgacaaaatttttacgaaatagctctccatctaacttatcttgttcgttaatttcatttgaaactaatttatcataaatcgctctaatgtctcttacattatcaactttaatttttttattaagttctatctctttatattgatccacgaggcctctgaacttaagaaattctgatgcttggttatttaacgcatgtgcaatctcttgtttagtactaaatacattttcaatttcattagtactttgtaattcatcgattaataaatcattaaaatattgttctctagctgcatatggtaaagaattaagtgctctatcaatttttctactattaattgatattaattcttgtttttttgatagatttttagtcaccataaagaatagaggatattccaaatcattaactttttttccattttccataggtatgatattaatattagtattgaaagaagctaaagaattaaatcttttaatatactcttccttcattttactttcattgtgttcatgaaaaatactttttaaagttctgtaacccatttgcagcctcctctactcatttaaaatgtattttttgtccaataaatcaattttcattagattagctaaatattatcactttttttctttaaaaactatataaataactattttctcaatcaatagaaaaagatttttcatcacaacaaaaagagcagtacatttgtcatgcaccactctcccttaaaatatatctaattatgctttataaatgaatcaccggaaatcaaaatatatcttgcctaatactaacaacatttacagtgatgctattagtcgaaatgtcttttaaaataactgaagtacttctttgaatgagaatatacctgtcaatattgtaacaagtactgcaacgataccaaagatgaacatccaatttgggtgtttataatcaccaacaattgatttctttttacttgcaatcaaaattgcacctaacgtaataggtaaaatccatccatttatcgcgcctgctataattaaaaggctgattggttttccaataaataagaaaatcattgttgaaataacgataaacacaatcacaattaaattacttctttcgttaagtgatttatgaagtgtttttaaaaatgttgcgcttgtgtatgctgagccaattactgatgacatagctgcagcaaataacacaataccaaaaatattctttccaattggtccaattgcgtgttcaaaaactgacgctggtggattttcagaacttagtgtcacacctgttacaacaactcctaataccgctaggaatagtaacgttctcataatacctgtagttaaaataccagcaattgctgattgatttacaaatggtaaatattgcttacctttaatgccagagtctaatatacgatgtgcacctgcaaaggtaatataaccacctacagttccaccaactaacgtaatgatgggcaagactaatttcattggatgttctggcgcaaatgtatgcacaaaagcatcaccataaggtggattagaaacaaacatcacatatgccacaactaaaatcatcacaataccaagaatcattgaaacaacgtccataattttttggccacttttacttacaaagattaatattgcaaagattgcagtaatagctgcgccccattttacatctaatccaaaaattgcatttaaacctaaaccggcaccagcaatattaccaatattaaaagctagaccaccaaatgcaatcaatattgagataacagtaccaagcccaggaacaactttatttgatatttcttgacctcttaaaccagttacaactaatatgcgccatatattaatttgtgcaccaatgtcaatgatgatagacagtaatatggcaaatgcgaaacttgcaaaaaattgtgatgtaaatactgctgtttgcgttaaaaatgctggcccaattgcagaagttgccatcaaaaatacagaacctaataataaccttttatgattttttgtgaattcaaagtcactttcttttttaagctttaaatttctccccatttttttagccccctataaggattgaatatcaatgccttctttcattaaaatttctctaattttcgaaacaaataataatgcatgttctccatcaccatgcacacaaattgtatctgcttgtaacgttacttccttattgttttttgaaataactttattttccttcaccatctttaaaacctgcttaagtgcttcgtcagtatcagtaatcacagcatcactttcttttctactaacgagctgcccatcatcttcgtatcgtctatcagcaaacacttcagaagctgtaattaatccgacattctttgcttctgaaattagatatgaatttgctaatcctactaacactagtgatggatcaaagtcataaacagcttgtgctataacgtttgctatttctctgtcttttgcacccatctgatacaatgcaccatgcggtttaacatgattaattttaacttgatgaatgcgacaaaacccttgtaatgcacctaattgataaatcatcaaattataaatctcgtcgttagagatatctatatttcgtctgccaaagcctttcaaatcaggtaaaccaggatgtgcacctactgcaacattatgtgctttggcaagttttaccgtttcattcattacattttcatcaccagcgtgaaaaccacaagcaacattcgcacttgtaattaacggaataatttgatgatcaccaccaaaggaataatttccaaatgcttcgcctaaatcacaattcaaatcaactcgcattataattccacccctttaacaatttgatgtttttctaaaaatttaatatcaacatcttttgcatctccatcacgatatagtggataatttaaaactgcatataaaaaatcggcagttgtagaaaatccatctatcaccatttcatctaaggtgactttcaacttatcaattgctgaagctctatcatgagattttacaattactttagctactaaagaatcataatatggtgaaacttgataaccgtgatatagtaaagaatcgactcgcacattaaagccttgaggtaaatgtaacgctgtcactttacctggtgttggttgaaatttcttttcaggattttcggcatttattctcgcttctatcacatgaccattaaattgaatatcgctttgtgaaaaaggtaaatgattatgttccaataaatacagttgtgctgcaaccaaatcacgttctgctcgcatctctgtaacagtatgttcaacttgtattcgagcattcatttcaataaagtaatgtgcggtatcagttactaaaaattcaatcgtacctgcacttctataatttgctgcacgtgcaactttaacagcatcgttacatatttgttgtcgtctttcttcagttaatgctgcacaaggagattcttcgattaatttttgatttttacgttgtacagaacaatcacgttcccctaaatgtacataattatcctgcccatctcccataacttgaacttcaacatgttttgcaacaggtataaaagcctcaacataaacacgatcatcatcaaagtatttttttccttcacttttagcttctttaaatgccttttctaaatcttcagctttctttacaatacgtatacctttaccaccaccgccactggcagctttgataacaactggataaccgatgtctttggcaagattctcaatttcagacacatgattcacagcaccatttgatcctggaatcacaggaacacctgcatgatgaactgtttgtcttgctgttattttatcccccatcatttccatcgtttttttagtaggccctataaacgctatgccttgttcctcaacggtttgagcaaattttgttgattctgataaaaagccatatcctgggtgaattgcattagcaccagtgatttgtgcagcagatatgatgcggtcaatatttaaataactatctaaagcattagcttccccaatacatatagcttgatctgctaaatgtacatgcaagctttgctcgtccccttttgcataaactgctacagtttcaatcccatattctctgcaagctcttataatccttacagcaatttcacctctgttcgcaattaaacaacgaagcatttacttaccccctttacttaatacgtaccaaaacttggtcgtattcaacatttgtgccatgatcagctactatttcagtaatttctccagcaacatctgttgttacctcgtttaatactttcatcgcttcaacatatcctataatatctcccttgttaactttgtcaccgacattcacaattggttcagttaattctttactatcttgtaaaaagaatgtacctatcattggtgatttaatgtcatgataatcatttgtcgaaacatcggagttatcattcgcttttgaagctgtcaaatcattattgttcatactttgatttgattgattactgtgtgcagccaaatgattcgagtcagtgaagtcaatttctatttcatcttcaaaatttttatatttaaatttcttaacatcattttccttcactaatttgattatttgttcgattttttcaatattcattttacaaatccccttttaaaattgttgctaattttttcgaagtatgtcgcaagctagatgtatcaaaaattggagtcttttgatgactcttaagaatttcattaaacagagacatttgttcccgattcttatctacagcttcttggaatgatatccatttaaattgaattgtatcttgtggtttcatctgtgctaactttggcagatcaaatttgcatacagttgcaattttggtataaccacctatcgtttgtttatcattaagcagaataataggttgaccatcatttggtacctgaacactaccaagagcaaccggttcagaaatgatatctgcttgattaattggtgcaacgctgtcaccttccaaacgatagcccatacggtctgattgttcagtaattaaatatggatgatttacaattttcgctctagcctcttcagaaaatgcctcgaattgaggtccttgaagaatgtgtataatattattttctggcaataaatcgtcctgtaaatgaatcgtctttccaatgttttctttaaagtcattatttattttcactgttattacatcatcagctaataactttctacctttgaatcctcctatactgcttcgggtatgtgttgcataactttcagcaatagaaggtacgttgatagaatgaccaaaagtaagataaccgcgtgcacctttggttatagcacctatttttaaaatgtcacctttctcagctaatatgacagaattcattgatatagttttattatttagcgaagcattaatactaccaccggttataacaaatgtattttgcgtattaaattgaatggtaggaccaatcaaagtatattcaatcgctggaccatcattgttaattaatgactgcgcaaccttaaaactaaattgatccatggcacctgcgcctgaaaatccaatatgttcataacctattcttcctagatcttgtaccgttgaaaagagacctggttgtaaaatcttaattgacattttcaatcaccacccagtcatcaacattaaagttgccatctgatatatctctttcgatttgtataaatttctgttcatctattgcataaaattgtatccattctcctgcttcgtacattgacattggttcacgctcgctgctaaatacttttaacggtgtgcgtccaataatttgccatccgccaggagaatctgatggatatagtcctgtttgattattcgcaatacctacagaacctgcatgaatttttaaccttggctgattacgtctaggtgtatgtagttgttcatcaagtccgcctaagtatggaaatcctggcataaatcctagcatatatattaaataaggtttacttgtatgtttttcaataacttgctcaacagttattcgattatgctttgctacttcttcaatatctggtccatatgtaccaccatattgaacaggtattttaataatacgattggtttgattcacagcatgaacatttttttcattaaatttgttaagttctaaattttcaattaatttagaagatgttatagcttgttcatcaaaatatattagaactgctcgatacgaagggacaatatcttgaatttctaatatttctttttctcgtatccaccgtaccattgctgtgacattacgatatgtctcttcggatattttattttcaaaataaatcataattgtctgctcgttaataaatcttacatccactttaaatccccctttgtattgcaataaaccagtattgaataccttttcattgtatcattgagaagcacaagttgtttaataagtaattcaaatcgcatacaataacaaatgataatcaatttgttttctcggaaatattttgcttttttaaaatggagtagttaatattgtaactcttacactaatttaggttctgctatcattcggtctgatggaaaatttttacttttcatctgtccgattttttgattttgaatataaaaaagcacgaccgaagtatcattaacacacttcaatcgcgcaattaaataatctatttgatcatttattggatattaacaatttttacgttcatttcgccaccattaggtagtggaacacgaacttcatcatctaaacctttaccaattaacgctttagccattggtgattcatttgaaatcttaccattaaatgcatctgattcagctgaaccaacgatttgataactttcctcttcatcacctggtaattctacaaacgttactgttttaccaattttaacaacgttgttatctccagtatcttcaatgattaatgcatttcttaacatatgctcaattctttgaatatcttgttcgatgaatccttgttcatcttttgctgcatcatactcagagttctctgataagtcaccaaatgaacgtgcaactttaattttctctacaacttcaggacgcttaactgtttttaattcttcaagttcacgctctaatttttcaaaaccttcttgagtcattggatattgcttttgattttccatattgtcatcttcctttactgaattatactattgcttgctaactaaagactgaatttttgttgtcataatatctattgcaactttattgctcccaccttcaggaataattatatcagcatatttcttagtcggttcaataaattggtcatgcataggtctaacaacacttaaatattgattgataacagagtccattgaacgcccacgctctttagtatctcgtgttaaacggcgtaatattctcaagtctgcatctgtatcaacatatattttaacatccatcatatcacgtaataccttattttctaaagcgaaaatgccttctacgataataacatctttaggtttaaaatcaatggtaatgtcacttcttgtatgactagcataatcatatgtcggtacttctactgctttaccatttttcaagtctttaagattttcaattaataaatcattatcgaatgcaaatggatggtcataattggtttctaggcgctcgtcgaaagtcaagtgcttttgatctttataatagtaatcttgagcaagtaaagcgacactatgaccttctaagtttttcataatttcgttagttacagttgtttttcctgagccagatccaccagctatgccaatgattgtagtagctttcattagccaatttcctttctcatcatgttgtttggatatatcgggcgatccactttaatttgaacgatttgtaatggatggcgcgccgcgtctaagctgttaccttcttcatcataaattgcttctactacttgtgtaaatgtttcaatttctggaccaaagaattctatttcttgacctggtttaaagttatttcgttgttgaatagtcgcaatttttgtatcttcattatagtctaataccaaaccacaaaaatcaaatggtgattttttagattgttgttgaccaaacatctgttcttcataaccaggtgttccctcaaagaatgctggtgcagtgtctctatttgcacatttatctaactctattaaccattccggattaatcttaaagttgtcaggatctgccgcatacgcatcaatgactttacgatatactgagacaactgttgcaatataatgaattgacttcatacgtccttcaatttttaatgagtccacaccaatatccatcatttgaggaattgattcgattaattttaaatctttaggactcatcgcaaacggtgtaacttcaccttgattataaaaaacatcaagttcaccattatcatcaacttctaataattcataatcccaacggcaactttgacagcaaccgcctctgttggaatcccttgcagtcatatgattacttaatgtacatctacctgaataggcgatacacatagcaccatgaataaatgcttcgatttcaatatctactttttccttcatttcacgcatttccatcgcgccggtctcacgtgctaatacaacacgatccaatccttcttctttccaatattctacagctttgtaattagaaagtgattgttgagtagataaatgaatttcaagttttggcgcaacttctttacatgtttcgataattaaaggatctgcaacaatgatacctgtcgcaccagtcttttccaaattacgcaaatatgattctagaccttcaatattctcatcatgtgcaataatatttgtcgtaacataaattttggcaccgtaacggttcgcaaattcaacaccttcagctatttcttccatcgtgaaattatcagcatttgaacgtaatccatattcttgaccacctaaaaatacggcatcagcgccataatgtactgctatttttaacttttctaagtttccagcaggtgctaataattctggtttcttcataactgttttaggagttgatttaatctcttctattgtcttcatgattaacctccttaatatactgtttgtttatataagaaaccttcgtcaaatggtcgatgatcaggttgaatttcttcaattggatccatcaacataaatttctcatcttcatagatttcaggatcttcattgtacaaatctatcgcttgacgatactgttccgttaccacattaatatattcttccgtttgtagaataccatcgattttaaatgaatctatacccgcctcaaaaaatggtgctaattcttcaattaaacaaatgtcgtttggtgacataatgtgcgtaccattgtaatcttcgtaaactgggtaattattttgtctttcttcatcataaagtaataaagattgttcatcattgcgacgttcaattttcatttggcgatcttggaacgtataataattgcctagtagcatacgctttgattgaaacatacaagtcattccttgaacttgcacctcaatttccacatttgaattttcttttatattaataatttcatccaaattcagctcacgtgctaagacagctcttgatgcgcctcttttaccccagtaattacattgaaaatgattagttactaacgtctctgcattccaatgaagtggtattggattttcttgcgccttcacatacattactactgctggatccccgaaaataattctgtcaactcgtatttcatgtaaaaaattaatataatcttctacagcatctaaatgataattatgaaataatccattcactgccgcatatacttttttatcgtttttgtgagctaatgcgacagcctctgtcatttgttgtctattgaattcccctggaagtcttaaaccaaacttttgctcgccaattacaaaagcatctgcacctaaatcaataagtgtttccatatggcttaatgacttgggtgtgacaagtaattctgtcatagtcattctcctttaattgaaatcgctaatccatcgtctatatttaaaaaattcgttgtatatcctggttgctttattaaccactcattataatcttgaacctttttaaccatttgtcttacatttctcgatctaacaatcccaatatccgatacaaaaccgtgatataaaacattatctgtaattacgagaccttggtgctttaaaagtggtgtatatatttcaaaaaatttctttgattgcgcttttgctgcatcaataaatatcatatcataaactttgtcatttacattttcaaattgctctaaagcattaccttcaataattcgaacctggttttcaaaatgataagtagctaaattttgtttagcatattgaatcatcgtttcattacgctctatcgttgtgacatgaatgtcatcagatatagaagcgaattgcatagaactatagccgattgctgtaccaatttctaaaatatttttaacattattcatacgaattaattgcttaattaaatctaatgttaaacgatctacaattggcacttcatttacctcggcaaattcacgcaaaacttcgattgaactattttgatgttgatgtaaatctattaaatattttttatttaggtcatccatgttttaaacttcctttatgtaaaataagtcaatatgattatgacaataaaataaatcagccttcacaattgattataattttgccaaccaattaaatgactgatttcgtgttagacgcaaagctattttatttatagaagcgaatcattcatataaaatttaactttagatattttaccatattttcaataaaattataagcgttaattatttatacattgcttgacttaaaaaatactcttgcctccccatctttaaggttagcaagagtaaaatctttttaattattcttccatttcagtatttacaacttcttcaatcatgtcccattcttcatcagtttcgattggtactaacttaccaccgtcacctgactcatctggttcattgatcattggtacaagctcaatcatatcgtcttcatctgattgagcaccttcttcagctaagataacatactcttttttgaattcaggatgataaaattctaaaacttttcggtataaaacttcatttccctcttcatcgaataaagttaataattcttcttcgttattaatttctagttgtgaatcatgattatgttcagtcatagtaaaatctccttttaatgtagtgaatctaaatagccttgtaaaataaataccgctgccattttatcaatcacttgttttcttttttgtcttgaaacatctgcttctaataatgatcgttcagcagccattgtgcttaatctttcatcccacatcacaatctcaatagaaggataagcttctaataatttttctttatatgttaacgaagcttcgcctcgaaatcctattgaattattcatgtttttaggtagtcctattacgactgtacccacattatgttttttaataatgtctactaattggtcaatacctaattcattattttcttcattgattcggagtgtgtctaatccttgtgccgtccaacccattatatcactaattgcaattcctaccgttctactaccgacatcgagtcctaaaattttatgttgtaacataaattatttattttgctcttttaaatagtaagaaacaagctcttccataataacatctctatcaatatgacgaatttgatttcttgcttcattttggcgtggaatatacgcagggtcacctgataataaataacctacaatttggtttacggcattatatcctcgttcatctaatgttcgataaacattatttaaaacatctcttacatcttgcgttggaagttcttcatagtcgaatttcattgttttatcaaagttttccatttgcgacactcctttaattacaaatataactcactatcatcatacaatattatggctttaaattatagatttttaatgtaatctttaataaagcttaatgattttgagatattttcaggttgtgtaccgccaccttgagccatatctggacgaccgccacctttaccaccaacgattggtgccatttgtttgataagatcaccggctttaacgttatttgttaaagatttagggacagttgcaaccatcgatactttatcatcaacattacttgcaagaatgataattgtatcttgtagtttagatttaaaatcgtccattgtcgagcgaattgctttcgcatttggtacatccacttcagtaaccaatactttatagccattgatttcttcaacttgatcttcaatattacccattttaagtgatgtgatttctttgtcacgttgctctaattgttttaataatgctttttcttcatcttgtaattgtgttaacttatcgactacttgatcatcagatttcactttcagctgtgatttcatcgtattaaatttctcttgaatatcttctaaatataagaaagctgctttacctgttaatgcttcaatacgacgcacaccagctcctgtacctgactcacttactattttgaataagccaatttcagaagtattgcggacatgaataccaccacataattcaattgaaaatggtgccatatttactacacgcacaacatcaccatatttttcaccgaataatgccattgcgcccatttctttagctgaagcaatatccatttcttgaatgttaacgtcaatacctttccaaatttcttcatttactaagcgttcaacttgatcaatttcatcattagtcattggaccaaaatgagagaaatcaaaacgtaaacgatctgcttctactagtgaaccagcttggttaacatgatcacccagtactgatttcaacgctgcatgtaataaatgtgttgcactatggttcttttgaatgtcacgtcgatcattttggttcacttcagcagacactgtagcgccaacatttacttggccaaattgtactactcctttatgcaagttttgaccatttggtgctttggttacttcactaacagcaatttcaaaattgtcattataaacaatacctgtatccgcaacttgtccaccactgattgcataaaatggtgtttccgttaacatgaagtatactgtttcacccgcttcaacttgtgaaacttcttcaccattgtatatcaagtgtgttagtgttgtttgagctgtcgcagtatcataaccaacaaaagtacttgcagatgtaatatttttcaatacttcactttgaacttgcattgattgagaattttgacgtgcttgacgtgcacgatcacgttgttgttgcatttctgactcgaatgttgtcatatcaactttcaatcctgcttgcactgctatttcttcagttaattcaattgggaacccatacgtatcatacaatttaaatgcatctttcccattaatttcatttgttgtcgctttagcttttttaattaattcatttaaaatcgctaaaccatcttctaatgtttcatggaatcgttcttcttcagactttataacacgcttaatgaaatctgctttttccttaacatttggataatatggttccataatgtctgcaacaatatcaacaagtttgtacataaatggctcattgattcctaacgtttgactaaaacgaacggcacgacgtaacaatcgacgtaatacataccctctaccttcattggcaggtaatgcaccatcagaaattgcaaatgcaatcgtacgaatgtggtcagcaattactttaaatgccacatcttgttcgttgtttactaaatattgtttacctgatactttttcgatttcattcattataggcataaataaatctgtttcatagttagtacgtacattttgagaaactgaggccatacgctcaagccccatgccagtatcaatatttttattaggtaatggtgtgtaactatgatctttattatgattgaattcactaaatactaagttccatacttcaagatagcgttcattttctccacctggatacatttcttctgccggatcgtcttgtccatatgcttctccgcgatcatagaaaatctcagtgttcggtcctgaaggcccttcaccaatatcccagaagttaccttcaatgcgaataatacgactttcttcaagcccaatatctttatgccaaatgttgtatgcttccatatcttccggatgaatcgtaacgtacaatttatctggctccatacccatccatttatcactcgttaaaaattcccaagcaaattcaatcgcttcttgtttaaaataatcaccaattgagaagttacctaacatttcaaagaatgtatggtgacgcgctgtgaaaccaacattttcaatatcatttgtacgaatagctttttgagagtttacaattcttggctttttaggtgtttcacgtccatcaaaatatttctttaatgttgctacacctgaattaatccataataatgtatcatcatcaattggcactaatggtgcagaaggttcaaccatatgtcctttttcaacaaagaaatctagatatttttgtctaatttcactcgcttttaactttttcatcatttacacatcctatttactgtttttaaattaccattccataaaaattgatgacacagatagtcgatttgcaaaactagtataaatcaatatcattttttattattaaaaaataaaaaacgcccatcctcaaaagggacgaacgttatcgcggtaccaccctagttataaatgcaattcaacacatttatcactttaattcgactatacagttgtgcataaagtagcgttcactaatgtttgttgtacttttcaccaaccagtacatctctgataaacaaatcattaactactcatctttatacgaatttaattctattttagttacatttacgcttgttgtcaacgttctataaagtcatacggcgtgatttctcccatattaatcattgggtcaattttaaacattgtagcttccgttaatacatttgtatctgtttttgttgaatcagacataacttcttcactatcattcgatgacattggcgcttctacttgatcatctattgtcgtttgtgaagctcctgtatcattagttgctgtgttttccagcatttcttcatcttctgaattaaaataatttttcaacaatgtacataattgtgttaaacgcgcttgaccatttgttttcaatccaatatcaaatgcttccggatcaccaagtaaaactaaactcgttttcgctctagttaaaccagtatataatatcggtctttgtaacattctaaaatactgtttaacaataggcatgataacaataggaaattctgaaccttgtgatttatggattgatgtacaataagcatgtgttaattccatcatatcttgtttcgtaaatgtaatttcattaccttcaaaatccacaacaagtacatctttattaagggcattttctttcgcccaaaaaataccaacaataactcctatgtcaccattgaatatgttatcatttggcctattaacaagttgtaatactttgtcaccttttctaaagactacatcaccaaactcaatttctcgtgtgtctttctttttagggtttaaaatatcttgtaaaacttgatttaaacgtttaataccggcatttcctttatacattggtgcaagcacttgaatatcagccatagtataccctttattaacagcactagtaactaccttctcaacaactgttggtatttggtttgcctgacagttaataaaacttctatcatgaaaacgctgtgtaatatcaattttctgacccaacttcattcgatgtgctaattctataatgcttgaaccatcttgttgacgatatacttcagtcagatttactcgtggtatagctttcgattcaattaaatctttaaatacttgaccaggacctacagaaggcaattggtcctcatcacctacaaatatcaattgtgcatctaaaggaactgcacttaaaaattggtggaacaaccaagtatctaccatagacatctcatcaatgattatgagtcgtgcgtttatttcattttctaatatatcctctggctttgtgtcttgattccaacctattaaacgatgaatcgtcattgcttctaatccagttgactcttgtagtctcttagacgctcttcctgttggcgctgctaatacaactggataatcatcattgacataatcatcataatctaatgataagccatgaatctcagcatataattcaacaatacctttaattactgtcgtttttcctgttcccggtccaccggttaatagcatcaccttagaattgatagccgtttgcaaagcttctttttgtgaagctgcatagttcacttgattcgcatcttctatttcaccaatatgcatttgtaaatctgactgttcaatttctgtaagtttatttgtatgcgtctttattctgaataagttttgaacacttttgatttcagaataatacaaacttggaattgcaacttgttcattgtcaataattagtcgtttttcctcatttaagtattgcaacatttcgtctaatttttcaggttcgatgacctcttcatcttgataatttaatacatcaaccgttaaatctataacaacattgataggcaaatatgtatgtccctgtttaatacattcttcttctaacgtatagagcaacgcagcttttaatcgttcattatcgttataagcgataccaatatttctagcaagttgatctgctttattaaaaccaatacctttaatatcataaatcaattgatatggatttcgatctaaaatagtcagtgtatcgccgagataaaactgataaattgccattgaaagtttaggaccaaaccctaaatcatgtaaacgaatcattattttttcagattcttgatttgctgaaatttgttctgcaatttgtttctgtttctttttagataatcccgaaactttttctagcactgaatggtcatctaatatatcatttatcgcattgtcacctaatgtattaacaatattttgagctgtctttttacctacacctttaaacaaatcactagataaataacttataattgcttctttcgtttgtggcatttctttttcaaaagtctctgcttttaattgtttaccataacgtggatgatcaacaacttgccctttaaatgtgtagacatcgccttcaacaatattcggaagaaaccctacaacagttggcattgtatcaaagtcttcatttgtttcaatagtatctactttaagcactgtataaaaattatcactgttttgaaacaatatcgcttcaacagtacctttgatcattgaataatcaaatagtgtagggtctgacatgttactcctcctctttcattttagtgaatgttttcagcgcatgctgacttaataagtgtttagggtcgatagtcacagcttctttaaaatgagttattgcttcatcaatatcttcatttttcataaataacgctaagcccaaattgtatcttgcatcaacatgatttttatcaatcgttaatacatgtttaagttgagttatggcttcattaaacatttctaattgacataatacaagaccatattgaaattgaacttctgcatctttgtctttatctagttccgcagcagtcattaaatacggcaatgccagcttaaatgattctaactgattaaacgccataccgatcatataattacaatcaacttgttcaatctctgtttgtaatgcttgttgatataatttaatagcttcttgataacgttgctgattataatatacatttgctagattaaaaaatacgacgccattcttcggatctattgttaaagctttttggaaaaaacgctctgccttttcaatctcattcgcatcagcaagtacgataccagcattaatataattttcaataattgtaggattttcttcgatatttccgaacaatgcttgtaacgcttcttctatttttccattttgtatgtattgataaattgtttgttgatctatcatttacgaacctcatttctcatcaattataacatcttgataaattgtatgtctcgaatcacttaacaacgaataaaatataatctaatatcatcttcattcatgaaaaagcgggaatggaatagaaatgcttaagaaccattaacggtttattatgtaatggttcttccacattagccaccactattatgtacttaaaaataagaatacataattagattcatgcatagggagtgggacagaaatgatattttaacaaaattaaattcgttatccccaactggcattgcctgtagaatttctttacgaaattctctatgttgtggtcccgccaatataacattgtagagcctaggacattgtgatgtcccagactctatcctcatgaattattctcatcaaaaactgtctttcgtcattttcaacgttgaaacttcaaataagtaatttattgttgccattgtttatacaacataatttaattgaccttcatttttgaacacatcgtcaattgttgcaccaccaagacacacatcaccttgataaaaaacaactgcttgtccaggtgtgattgctcttactggctcagcaaaagtaacacgtagtgcatggtcgttttcacgtttcacaaaaactttcgtatctttttggcgatatctaaatttagctgtacattcaaaaccttgatctaagtcattatcttctggatttacaaatgaatagtctgaagcaattaagtaatcactgtataatgcatcgtgatggaatccttgttctacatataaaacattatcttttaggtttttaccgacaacaaaccaaggatcgccatctccacctatacctaatccatgtctttgtcctattgtgtaatacatcaaaccactatgtttacccattttcttaccatcaagtgttatcatatcacccggttgtgcaggtaaatattgtgataaaaatgttttaaagtttttttcgccgataaaacaaatgcctgtagaatcttttttcttagcagtaacaagtccttgttcttcagcaattcgacgcacttcactcttttcgatgtcgccaattgggaacatcacttttgaaagttgttgttgagataattgattcaagaagtatgtttgatctttattattatctacaccacgtaacatttcaacatgaccatcttcatgacgatgtatgcgtgcgtaatgtcctgttgctacataatctgcacctaaattcatcgcatgatctaaaaaggctttaaacttaatttctttattacacataacgtctggatttggagtacgaccttttttgtattcatctaagaaatacgtaaagactttatcccaatattctttttcaaaattaacagcgtaatacggaatgccaatttgattacacacttcaataacatcgttgtaatcttcagttgcagtacatacgccattttcgtcagtgtcatcccagtttttcataaatatgccaatgacatcataaccttgttcttttaagacgtgggctgttacagaactatctacaccgcctgacataccaacgacaacacgtatatctttatttgacaattatgactcctccttaaatttaaaatatattttatgaatttcagctacaattgcattaatttcattttcagtagtcaattcgttaaaactaaatcgaatcgaatgatttgatcgctcctcatcttcgaacattgcatctaaaacatgcgacggttgtgtagagcctgctgtacatgcagatccagacgacacatagatttgtgccatatccaacaatgttaacatcgtttcaacttcaacaaacggaaaatatagatttacaatatggcctgtagcatccgtcattgaaccatttaattcaaatggaatcgctctttcttgtaatttaactaaaaattgttcttttaaattcattaaatgaatattgttatcgtctcgattcttttctgctaattgtaatgctttagccatcccaacaatttgcgcaagattttcagtgcctgcacggcgtttcaattcttgttcaccgccaagttgaggataatctagtgtaacatggtctttaactagtaatgcaccgacaccttttggtccgccaaacttatgagcagtaatactcattgcgtcgatctcaaattcgtcaaacttaacatcaagatgtccaattgcttgaaccgcatcaacatggaaatatgcatttgtctcagcaataatatcttgaatatcataaatttgttgcactgtgccaacttcattatttacaaacataatagatactaaaatcgtcttatctgtaattgtttcttcaagttgatctaaatcaatagcacctgtatcatcaacatctagatatgttacatcaaaaccttctcgctctaattgttcaaaaacatgtaacacagaatgatgttcaatcttcgatgtgataatgtgattacccaattgttcatttgcttttactatgcctttaattgccgtattattcgattctgttgcgccactcgtaaatataatttcatgtgtatctgcaccaagtaattgtgcaatttgacgtcttgactcatctaaatatttacgcgcatctcttcccttagcatgtattgatgatggattaccataatgcgaattgtaaatcgtcatcatcgcatctactacttcaggttttactggtgtggtcgcagcataatctgcataaatttccatgtttggacactcctcacaattttatcaatgttccaataatagcaccttacatactatttttctacttttctgtttaactttatttataatgtttttaattatattttaccattttctacacatgcttttcgataggcttttttaagtttatcgctttattcttgtcttttttataaattttagtatttgcagatatttttttatttgtaaaatgtaacgtactattattttggttatgagcaatttaatatttatctggttattcgattggtatacttcttatatcataaaaaaggaaggacgatataaaaatggcgattaaatattcagcattaaaccttgtccctattcgagaaggtgaagatgaacaaacagcaattaatgatatggttaatctcgcacaacatttagacgaattatcatatgaaagatattggattgctgaacaccataacgctcccaacctagtaagttcagcaactgctttattaattcaacatacgttagaacatacgaaacacatacgtgtaggttctggaggcatcatgttacctaatcatgctccattaatcgttgcggaacaatttggcacgatggcaacattatttccaaatcgtgtcgatttaggattaggacgtgcacctggaacagatatgatgaccgcaagtgcattaagacgagatcaacatgatggtgtttataaatttccagaagaggtttcattattacaacaatatttcggccctgctcaccaacaagcatatgttcgtgcttatccagcagtaggtaaaaatgtgcctttatacattcttggttcttcaacagattctgcacatttagctgctcgcaaagggcttccatatgtgttcgctggacattttgcacctcaacaaatgaaagaagctatcgaaatttacaaaacgttatttgaaccttctgatgtattagacgaaccttatgttattgtatgtttaaatacaatcgttgctgaaaatgatgacgaagcacaatatttagcttcatctatggcacaagtaatggttagtatcactcgtggcagaatgcagcccgttcaaccgccaacacatgaactacaaaatatattaacgccgagagaatacgcgatggctatggaaagacagaaaatatcattaataggttcagaaaatactgttcaacaaaaaattcaagattttatggaaacttatggtgaagtcaacgaaattatggcaataagttatatttatgataaagatatgcaattagactcttatcgtcggttcaagaatgttataaatcagataaatgaaaaaaacactttataatgtgataaataaactaagtgaaagtatgtatccataatattaataaaaatatacagtaacagcattttgaatgaaagatgtctttattgttcaatcatttattttagtaatgattcaaattcacttaaaattctaatgcaaatatgaaagcgccccttcaactttacactgtgtaagtgtttatttgatggggcgctttcaaaatattgaaaagcatatccaaaatttaaagaaatttatttctctttatcttcattttcttttttctcttcgttattcgatcctgtatattcatttatcttatcttttacatttttaacttgttcattatcgctatttttaaatttttctactgcgtctttagctttatccataaaactcatattaatcgctcctcttatatttgattagtttaattgaacttattttttaagtttatcaattgcatcagttattttgtttttagcattttcaacaacttcttttgctttaccaatcactttatcttgctgaccttctttttctaattctttgttatcagtaacgttacctactgtttctttaacatttcctttaaattgatcgaacttactttcgtctgccatagtgaaacctccttggatgtatatatttatataccactaaggaggttcgctaaacattataatatgaagtttttatgttatagtatagtatttatacgattaaatataaaacatgtatccgtctaaatcttcacttgtatctacatattccgctaaatatttcaatgttgtattatctaaaacatctctcactgcatctctcatgcgaatccatagttgtttttgcgcaggtggttctgattcaatactttcaacaaatgtaattggaccttctaacagtcttataatatcccctgctgagatttcttccgctggcactcttaattggtatccacctttagcaccgcgtacacttcgaattaaccccgcatttcttaaaggacctacaagctgttctaaatataaatcactcaaattattttcttcagcaattgactttaatgatatacatccttgcccctcttttttagcaagagaaatcatcaatgtaagtccatatctccctttagtagaaattttcattgtataacctcacttaattcgaatattgatattcccattttagcattttttgagttaagatagtataagaaaggtgtgacaaatgtgagtacagaaccattagcatcgagaatgcgcccaaaaaatatagatgaaatcatttcccaacaacatttagttggaccaagaggcattatcagaagaatggttgatacaaaaaaattaacttcaatgattttttatggtccacctggtataggcaaaacaagtattgccaaagcaatttcgggcagtacgcaatataaattcagacaattgaatgctgtaactaacactaaaaaagatatgcaacttgttgttgaagaagctaaaatgtctggtcaagttatcttgttattagatgaaatacatcgactagataaagctaaacaagactttttattacctcatttagaaaatggcaaaatcgtcttgatcggtgctacaacttcaaatccttatcatgctatcaatccagcgattcgttcaagagcgcaaattttcgagttatatcctttaaatgacgaagatgtgcgccaagcgttaactcgtgcaatagaagatgatgagaatggtttgaaaacatatcaacccaaaattgatgaagatgccatgacctacttttctacacaaagccaaggtgatgttcgtagtgcgttaaatgcattggaattagctgtattaagcgcagataatgacaaagacggttatcgacatgttacattgcaagatgctaaagactgtttacaaaaaggtgcatttgtaagtgacaaggatggtgacatgcattacgatgttatgagcgctttccaaaaatctatccgtggtagcgacgtcaatgccgctttacattatttagcacgattaattgaagctggagatttacctacaatagttcgacgattacttgtaattagctatgaggatataggcttagcctcacctaatgctggtcagagaacacttgctgctattgaatcagcagaacgtctaggtttaccagaagctagaattccactaagccaagcagtaatcgaactatgcttatcacctaagtcaaattcagcaatgagtgccattgatagtgcattgtccgatattagaaacggtcatgtgggccaaattccaaaccatttaaaagatggacattatcaaggtgctaaagatctaggccgatctattggttacaaatatccacaccaatatgttaatggctatgtttcacagcaatatttacctgataaactaaaaaacaaaatttattacgaaccaaaaacgacatctaaaagtgaacaacaactcaaagaaatatataacaacttacttaaacaaaggccgtaaaaataagattaaatcgattacctttgatattttagctataatcaaatcaaaactgactagtacacgaggcatattctactatgcttgcgaactagtcagttttagttttatggtgtggttacacttgccttacgttgaaaattatccctttcaaaatgaattattgccctttgtctttaatgcgacgaactggaatatcttttaatacgtcattcaccacataacttgcacaaattaatccaacaacacttggcacaaaggcatttgaagaaggtggcatttgtccttttcgattgatagcatttttatctccaactatatcttttacatcttctcttatgacaattggactttcatctgaaaatacaactggaatccctttacgaattcctagttttttcaatttttgacgaataattttggccattggatcggtatgtgttttagagatatctgaaattgtaaaacgtgttggatctgttttatttgcagcacccatactggaaatcactttaatccctcggtcaagacactctttcattaagtgtactttgtacattattgtatcacttgcatctacaaaataatctatatcgtagttatcgaaaatttcttcatatgtctcttctgtataaaacatatgtaagggcgtgactttacaatctggattaattaatttaatacgttcttccatcaaagaaactttactttgtcctaccgttgtagttaaagcgtgtaattgtctgtttacatttgtaatatcaacatcatctttatctattaatataatatgaccaatattcgttcttgctaatgcttcagcagcaaatgaaccaacacctccaacgccaagtatgacaacagtttgttgcttcaataaatctaaaccttgttgtccaatcgctagttcatttcttgaaaattgatgtttcattattttacctctttcactgatttatacataagtacatagtaacttaaaattttatatttagcattatcactttgattattttcccaaaattcaacgaggaaacatttattaaacgctataaaacccaactaattctttattaaaaacttaaagaaacgcataaaaatacgcaagacaaagtcttgcgtatcgatagagtccgtattgccgtagttataatagcttgatcattcggcctgttatatacaggtgggtgccctgtttcttgttttgtacgtccttcatataaggcgtgtacgctgcaagaaaacccattgggctcccttgatcaaagagtgttaggcccaaattaaaaagcaaacttacgaacaactcagatgactatcttatgatgttatattaccacataattaaaattaatgaaattataacaaaccaaagtttattgattttttaaaatttagtgacgaattcgcaaagaaagttcttctaattgtttatcagaaacttcaccaggcgcattcgttaataaacatgtagcagatgctgttttagggaatgcgattgtatctctcaagtttgttctattagtcaataacatgactaatcggtctaatcctaatgcaataccgccatgtggtggtgcaccatatttaaatgcatctagtaagaagccgaactgttcttgtgcttgttctttagtaaatccaagaacttcgaacattttttcttgtaactcaccatcatgaattctgattgaaccgccacctaattcataaccatttaatactatgtcataagcatttgcctcagcttcttctggcgcagtgccaagcttagcaatatcagcttcttttggagatgtaaatggatgatgtgctgcaacgtaacgtttcgcatcttcatcatattctaataatggccaatctgtcacccataagaagtttaattttgtttcatcgattaaacctaattctttagctaatttgacacgtaatgcacctaaactttgtgcaacgacatttggtttgtctgcaacaaacattactaagtcaccagcttcagcaccagttaatgtaagtaatgtttcaacattttctgtttcaaagaaacgtccaattggacctgtcaaaccatcttccacaactttaacccacgctaatcctttagcaccatagatgtttacaaattctgttaaagcatccatatctttacgagtatattgttcagctgcacctttagcgacaattgctttaatttcaccatcattttcaacagtatctttaaatactttaaagtccatatcacgtcctaattgagaaacgtcaattaattccatttcaaaacgtgtatctggtttatcagaaccatagcgacgcatcgcttctttatatgtcatgcgtgggaaagcgccattaatttcaacgcctttaacttctttaacaacttttttaagcatttcttcacccatttgcatcacatcttcttggtctacaaaactcatttcaatatcgacttgtgtaaattcaggttgacgatctgcacgtaaatcttcgtcacggaagcattttacgatttggtagtatttgtcaaatccactaatcatcaataattgcttaaataattgtggtgattgtggtaatgcataaaattcaccatcatgaacacgagatggtactaaatagtcacgtgcaccctcaggtgttgacttcgttagtactggtgtttcgatgtcaaagaacccttcatcatccaaatattgacgaatagaacgtgtaatttgatgtctcattttaaatgtttgcgctaactcttgacgacgtaaatctaaataacggtattttaatcgaatattttcatcaacgttaacattttcttcatttatagaaaatggtggtgtctcagatttattaatcactttaatatttgtaacttgtacttcaacttggccagttttaattttaggattaactgtttcagggtcacgcttcgtaactgtaccttgaacttctacaacatattcagaacgtactgtttcagcaattttcaatgcctcttctgaaaatgcaggattaaacacgacttgtacaattccttctctatctcttaaatcaacgaaaatcaatccaccaaggtcacgacgattgttaacccatccttttaatgtaatttcttgtcctaaaaatgcctcagtaactaatccacaataagttgttctcttactcatattttaacgccctctctacttcttaaaatattcgactaatgcgtctaattcaattgtttcagattcaccagttgtcatatttttaacatcgattttattattttctaattcttgatcaccaataacgattgtaaacttggcacctaaacggtctgcttgtttcatttgtcctttaattttacgctgtaaatagtctttatctgctttaataccattatgtctcaaatgatttaatagcttcacagcatatcgatctgcttgatcacccattgtaacaatgaataaatctaagttttcttcaatatctaattcgataccttcttcttcaagtgcaagcaataatcgttctatacttagcgcaaaaccaatacctgtttcacttggaccatctagcaattctaataaaccattataacggccaccaccacaaagcgttgtaatggcaccatcatagttagggttatccatcattaattcaaatgctgtatgtgtataataatccaatccacgaactaagttaggatcttcaatatatggaatacctaaatcatctaaataagcttttacttgttcataatatgccttagattcctcatttaagaaatcagtgattctaggtgcagtcttaatcgcttctttatcacggtctactttacaatccaaaattcgcatcggatttgtatgcaaacgtgattgacaatctgaacaaaattcatgaattactggttcaaagtgtttcactaacgcttcgttatattcttttcgagacgccatatcccctacactattaataacaagctttaaatgttttaatccaaatgattgataaatatgcataaccatagctaatacttctgcatctacgctaggattttcagcaccaatagcttctacaccaaattgattaaattgacgatagcgtcctttttgcttacgttcatatctaaacatcggtccattgtaataaagtttaattggttggtttggattaccttgcattttatgttcaatatatgaacgcacaactgcagctgttccctcaggtcttaatgtaatacttctatcgcctttatctttaaatgtatacatttctttttgtacgacatcggttgaatcaccaacacctcttgcaaaaagatctgtactttcaaaaattggtgttcttatttctttataattataaaatgtcattaattcatctaattgattttcaatgtaacgccatttctttgaatcttcaggtaaaatatcctgcgtccctctaggtattttaatcattttgacatctccctcggcaaactattttatttaattacctttttaaaactaaaactatatacgaccacttaactttgcacgataaatcataatcttaaaagcaaaagaaaaagcccttgcacagcctgaaactgcacaagggacgaatatccgtgttgccaccctcattggtttaaaaaacatgcctaattgtaatcatcattactttttataagcgtgcatttaataaacccactcaaaacgtttaacgtacgtttaacggctttacttttcataaagcacctcttcttgtgttcaatgtatataaactactcagcataatctttcagtctatggattatattcctacacaatcttagttagattgctacctatttcatttaccatttcaagaatactaacggttttagttataaaattcaatatcaatgataactactttcacatatttttgcaagccctacgcagaaaaataaattttaaggccatcaacaattgcttgttctaaaatttgtctatgtaattgatctttaatcatcgtttcatcagttgggttactaatataacctaattctaataaaacagcaggaacttttgtttgtcttaacacttgataattttcttgtcttgaaccgcgattagaaagtagacctttcttctgaatcgtagcgtctaacgtatctgctaaagctctttgattatcatgataccaataaactgtcattccatttgcattagatgattctaacgcatcattatgtatactcaaataggcatcgcctttgatatcacgattttctagtgaaacatatgtatcgtctgttcttgtcatcttaacagttgcgccttctttttctaaagtacgctgcaattcttttgctgttttcaacgtataatctttttctaaacttttatatttagtattgcttgaagcaccctggtcactacctccatgaccaggatcaagcactattgttttaccttgcaaaggatttttctccttcgtattatccgcgacaatatctaaatttgtgtgccatccagctatccaacctttttcattactggatgtatcttcaacttcaatccatttacctactttaccaatctttttaaaatggtcacctttttcaactttatatatgactgaatacgcagcgtttggacctgtacgtaattcagcattttcagttatcgtgatgttcccactatcttcactattgctattcagcaataaaaataaaaagatgataaataagacaaaggcaatcactactattagagtacgtttatttttaagaccctttttagataaccatgcctctatttttttcattgaattttgccgtcctgactttcataaataatagtgactggaccatcattatttatgctaacattcatgtgtgttccaaattcacctgttttcacagtaagaccatacgctcgtagcgcatcattaaaatactcataaatttttaccgcttgatcaggatttttagaatttgagaaacctggacggttacctttttttacatctgcatagagagtaaattgtgaaactgatagtatttcaccattcatttgttggatattaaagtttaatttattattgtcatcttcaaataatcttgcattagcaattttctttgcaattacatctgcatcttgctctgtagagttctgaccgataccgactaataaacaatatccttttttgatttgattatttaatgtatcattcgtcaccgatgcttctttaactctttgtacaactactttcatattttgcacctctagttccaaactcttgttactgtataaacatcaccaagttgtttgatcttttctaccacacgataaacatcattcacgtttttcaccatgacactaatatttattattgcatttttatcaatatctgaacgtcctgaaactttaattaaattgccggctgtcgagctaacagcttgtagtacttcattcaacaagccatttcggtcatacgcagttacctctaaatcaacctgatatttttgagttgcgtcttttgattttacccattcaacattaattagtcgttcagtttcgttcttaatatttgggcaatcagtgcgatgtactttaataccgtgacctttggtgatataacctacaatatcatcacctggtataggattacaacattttgacaacttgataagtacattttctaaaccttctacatagacaccactatcagtaatgatgttgtctttaataggcaatgatttcgtaacttcttgtgcttcatttaaagcacgttgtttatctaaaatacgttgtctttcagttaatttattaacaatctgtaaggatgtcacgccgccaaatcctacagctgcgaataaatcatcttcatttgcaaagttatatttttcattaacaacctgaatatttttctctgtcaaaatatcttcgactctaaatccttgctcttttatttcagcttcaaccatcattcggcctttttcaatattagatgaacgatcttgttttttgaagaaacttttaattttacctttggcactagacgatttaacaattttcaaccaatcacgacttggtccatatgaatgtttactagtacgtatttcaacaatatcgcctgtttgtaaaatatagtcaattggtacaattttgccattcaccttggcaccaatcatcttattacctacttcactgtgaatcgcataagcaaaatcaatcggcacagcaccatatggcaactcaataacatcactcgctggggtaaatgcgtatactttgtcactctgtaagtcatattttaaggtttccataaattcttgagcgtcagacgatgtatgatccgcttcagctaattcttttaaccaatttaacttattttgataagtttgatctttttcacttacttttttaccttctttgtaagcccagtgtgctgcaacaccatgctcagcaatttcgtgcatatcaaacgttcgtatttggatttcgagcgggtctccatttgggcctactactgtagtatgcaatgactgatacaaattttgtttaggcattgcaatataatctttaaaacgtcctggcatcggtttccataacgtatgcaccaacccaagtatcgcataacaatcattaatagaattgacaataacacgtatcgccaacaaatcaaaaatttgatcaaattgttttttctgcttcatcattttccgataaatactgtaaatatgtttaggtctaccatttatatcgccttcgatattcattcggtccatttcagtacgtattctatcaatagccgtttcgatatacgcttcacgttcactacgtttcttcttcattaaattgactattctaaaatattgcacattatcaatataacgaagagccgtatcttctagttcccatttgattgtattaataccaagacgatgtgctaatggtgcataaatttctaatgtttctcgagaaattctaatttgtttttcgcgcggcatggctttcaaggtacgcatattatgtaatctgtctgctaatttcaccaaaattacgcgtacatctttggcaatcgcaataaataacttgcgatgattttcagcttgttgttcttcttttgagcggtattttacttttttaagcttcgtcacaccatcaacaattcgagcaacttcttcattgaacatttcttttacatcttcaaatgtatacggtgtatcttcaattacatcatgcaaaaaacctgcgacaatcgtcggtccgtctaatcgcatttctgttaaaatacctgcaacttgtataggatgcataatgtatggtaatccgttttttcggaactgacctttatgtgcttcataagcaatatgatagctttttaaaacatactcatattcatctgctgacaaatatgattttgctttgtgaagaacttcgtctgcactatatggatattcgttgttcattatatgatacaccccattcatatttattacttcgccttaaacaatgatttaggtactcttgttgaatagtatttgtcccacaccaatcatacgtccgtcgacgataaatatttatcctgtcgtcattaatcgtaatattaattttacttgagcgagtttaatttgtatactattcctacttttaaaacttttacaaaaattcgacctaaatctactgtttcattttttaaatattagttctatgatactacaatttatgaaataaataaacgatgttattaaggtataatgctcaatcatctaacattttcagtaaataaaaaatcctaacatctcatgttaagaaaacttaaacaacttttttaattaagtcattggttcttatacatttgatgaaggatttcatttgataaaattatattatttattattcgtcgtatgagattaaactcataacatcgtaatctttaattttttcaataccatttaaatatttcaattcaattataaatgcaatacctactacgataccgcctaatttttcaactaattttattgctgcttcaatcgtaccaccagtagctaataaatcatctgtaattaacacacgttgacctggtttaattgcatctttgtgcattgttaaaacatttgtaccatattctaggtcatactcataacgaatgacttcacgaggtaatttcccttcttttctaacaggtgcaaagccaatccccattgaataagctacaggacagccaatgataaagccacgcgcttcaggtcctacaacgatatcaacatctctgtcttttgcgtattctacaattttatctgttgcatagccatatgcttcaccattatccataattgtagtaatatccttgaaactaacacctggtttcggccaatcttgaacttctgatacgtattgctttaaatccattaatatttcctcctaaattgctcacgacaattgtgactttatccaattttttatttctgaaaaatcttgatataataattgcttttcaacatccatacgttgttgtcttaattgatatactttgctggaatcaatcgatcttttatcaggttgttgattgattcgaattaaaccatcttcttgtgttacaaattttaagtctaagaaaactttcaacatgaatttaagtgtatctggtttcacacttaaatgttgacacaataacataccctctttctggatatttgtttcttgtttagttattaatgctttataacactttttaaaaatatccatattaggtataccatcgaagtaaatcgaatgattatgttgcaaaactatataaagttgagaaaattgcagttgttgcaaggaattagacaagtcttccattgacgttggtaaatctcttaatactactttatcagtttgttgtttaatttcttcaccataataatattcattcgcatttactttatcacttttaggatgaataagcacgacaatattttcatcattttctgtaaaaggtaaactttttcgcttacttctataatctaatatttgctgttcattcatcgcaatatcttgaataattatttgcggtgattgattaccattccattcgttgatttgaacagatcctaatatattaattggctgttcatcttgtaactcaggttctaagtgtccattttgccaaaatagcgcggcgatattactttcaccaagtgtcaattttagatgatttttttgttgacctatcgccttaactgaagaaactgataaatcatccatttcaaaaataggtctagaaaaatctgttccgaagggtcttaaacgattcatatcacgaatatttttaatcgttatatcattttctgttaataatacatctacttgctttacgggatctaacgaagttgttttagataattctttcatccatttatttaaaccttcagctaacgattctatattttcaatatccatcgtcatacctgcagccatatgatggccgccaaatttagcgattaactcttgatgtgctgatagtatttcaaacatcgacacttgatcaattgatctggcggagccttttgcatgattttgctccctatcaatatttaaaattaatgttggcaaagcaaatgtttcgacaattttcgaagcaacaatacctaagacaccttcatgccaattttcttttgctaaaagtaaaaataaatctccctttttaactttcgtttctgccatagccattgcttcttctgtgatagttgctacaatatcttttctttcacggttaaaatgttcaacttgttctgctaaaaatgcagcttcttcttcgacgtcagtcatcaacaattcgcaagctaatgatgcgtcatctaaacgacctacagcattaagtctaggtccaataataaaaccaattgtttcttcatcaatattgtcattgtatcccgcttcttttagcaatgctttaacagaggtcggacattgatcatttaagacttttaatccttgtttcactaatgatcgattttcatcagttaaggatactaaatccgcaatggtacctatcgcaactaatgctttaaaataatcaggtacattttcaatcaatgcttgtgctaatttgtatgcaacacctgcaccacacaattgttggaacggataattaaacgatggatgcattggatgtacgattgcatatgcttctggtaatgtactaccaatttcatgatgatcagttacaatgacatcaactcctaaatcttgaaccattttaatttcattatgaccttgtatgccattatcaacagttatgattaatgttatgccttcatcatgagcatttctaaatgctagttcgtttggtccatatccttcggtaaagcggttaggaatatgccatcctacttgtgcacctaaaagttgtaatgttatcactaaaattgtagttgcggtaacaccgtcggcatcgtaatcaccataaactaggattttctcatcattcgctatcgctcttttaattctttcaatagtcttagtcatatcgctcaattgcagtgcatcatgattgatatctgtatctgaaatgatggattctattgcttgttcatcaataatcgatttactttctaatattttttttacgattggcgttaactttaattttgatgttaattcatcacttatgtattcagctggtttagttaatttccacttatacttcggtttaatcatatatatttacgcctcatttccaaaagacattatatctaaaattactttaaataaaaagcacttatctaaataatcaagactttaattataccattttttaaaaatgaatgcgggaacttatttatatatattttgttaaatttaaataaagtaaaaagcggtatgtgaactctttattgtttcacataccgcttaattcattttaaactaaaatcttttcatcgttcgatttcttttctttatatacaactaatttgtgtttcggcgattttttcaactgacgttttttcattattccccatagcggaacggcaatgaagattgaagagaatacaccagaaatcaatccgataaataatgctaaagtaaagttgaatatcgtaggagcaccgaagaatagtatagcaactactactacaataactgttaatactgtattaattgaacgtgtcattgtctgtctaattgatctattaacgatatcatcaatttgttctgttgtcgtaatcactttaaccttttgtaagttttcacgtacacggtcaaacgttacgattgtatcattaattgaataaccgacaattgttaatacagcggcgataaatgttaaatctacttcaattctaaataaactgaaaatcgctactataatgaatacatcatgtaataatgccaatacagatgaaagacccatgcgccattcaaatcgtaatgatacatagatgatgatacctatcgatgcatagattaatgcaagcattgcattttttgctaattcctgtccaataattggtgatacagtgttaatttgaggtgtgtcaccgaatttcgatttaatattatcactcaatttattatcttgagcacgcgttaaatcgtctttaaattgaacagttgctactttattgtctttaccattgatctgaatttgatccgctttaagtccactatcttttacaacttgctctaccttttgttgagtaattgcttgtttagattggaaatctacgcgtgtaccacttgagaaatcaattcctaagtttaacttgaagatataaagaataactaaaccgacaactacaattaaaatacttactccaattaatggcttagctaatttaacaaaattccatttctcgaatgaagttttaaggtcatgaacatctacaccttcattaatatcatgtcgtttattctttttaacaccaaataaccaaaattgatttttgaatatatttgatgaaacaagtaatgataataagaatcttgataagaacacggctgtaacaaagatcattagaatacctaataataacattgtcgcgaaacctttaactgaactttcaccgaagaagaataatactgctgcggcgataactgttgttaagttagaatcaaaaattgttaggaatgaacttttgtttgctttagaaaaggcttgctttatcgttctacctattcgaagttcatccttaatacgctcatacatgataatattggcatctacagccatacctacacctaataccaacgccgctaatcctggtaaagttagaaccccggaaatgaaattaaatgctactaacgttagatagatataagttgtcaatgcaataatcgctactaaaccaggtaatcggtagaatccaagcatgaataaataaattaatgctacaccaataaacgatgcaaacacagttttatctaatgcatcttgaccaaattgggcacctactgagtttgaataaatttctttcaagtcaactggtaaagaacctgcatttaacaattcggcgatttgttttgcttttttaacgccttcttgtcctttaaatccacccgagatttctacgctatcagaattgattggttgatcaacacttgctgcagaaataaatttagggtttttcttttgtgcttcttttttatagctgtcaccttttttgaaatctaaccaaacaaccatgacattatcacgtttcttagagatttcttccgttacttttttaaatttgtttttgtcttttactttaaaagtaactgtaggctggtttgtttcctgtttaaattcttgtttggcagatccctgtttaatatcagaaccgcttaattttactttatcttctgcatcgcgaattgttaaattagcttgagaagataaaattttacgtgcttcattctggtctgttacaccagcaagttgtactctaattctattaggttcttcaacttgaattttaggttccgaaacacctaaaacgttaacacgattttctaatgtttgcgctgttgattgtaaggcttttttatctattttgtcgcctttatttaaaggatcgacttgataaagcacctcaaatccaccttgcaaatcaagtcctaaattgacattctttataacacttttataagttgcagccattccggcaaacaacaatacgactaaaagcaagaacgcaattattctactacttttcttcacatgaacacctcattatttacgtatgtatttagaatacttgaatactattttataacgcaagttaaatctttcttacaaaatttattagccttatacatattaacatactagagcagggagtaaaaatagtcatagatatatttaatttaaatttaacaattattatgtatcacaatttctttttttggaataaaaataagctattctacatactacttataacttaaaaaggatgaaacgctattcgtttcatcctttttaataccacttctcattatgaagggtcaacttgtttaatagcaggtttttcgaaagttaattcagtaccatgaccattaactgtaataacaacagttgtttcatctactgctttaacagtacctttaataccaccaatagttgtaattctttgaccagattgaatgttattaatcaactcacgatgctgtttcgcacgtttttgttgtggtctgatcatcaagaaatacataaccgcaaaaattacgactatatatattagtaatgaaaattgcattttatacgctcctcttgcttaaaagttttttgggttctcaacatttaatccatattgctcgaagaattcttctttgaaatctaaaagacgatcttctcgaatggcttgtcttatatcttccattaattttagcagaaaatgtaaattatgaatagtagtaagacgaataccaaaagtttcctctgccttgattaaatgacgtatatacgctcttgaatagttttgacatgtataacagtcacaattctcatctaacggtcttaaatcatctgcaaattttgcatttttaataactaaacgaccttgcgatgtcatacaagtaccatttctggcaatacgtgtcggtaagacacaatcaaacatatccatgccgcgaatactacattcgattaacgcatctggagatcctacacccattaaatatcttggtttatctttaggcataaactgctctgtatgttcaaccattttatacataaccggtttaggttcaccaactgacaaaccgccgattgcataaccaggaaaatctaattctactaaatcctttgcactttgttctcttaaatcttcatattcgccaccttgtataatgccgaacaatgcttgatcttcaggtctttggtgtgcatctagacatcttttcgcccaacgtgttgtacgttcaatagatttttttacataatcatattcagcaggcatcggtggacattcatcaaatgccatcataatatcagatcctaaatcattttgaatttgcattgatttctcaggactcaaaaataatttagacccattagtatgatgtctaaattccacgccttcttctgtaattttacgtaaattacttaaactaaacacttggaaaccgcctgaatctgtaagaatcggaccatcccaattcatgaatttatgtaatcccccagcgtgtttgataatatcatttccgggttgtaaccacaaatgatatgtgttgcccaaaatgatttttgcttcaatttgtcttaactcttctggactcattgttttaacggttgctttagtaccaactggcataaacataggtgtttcaaatgaaccgtgtggtgtgtgcacgatacctaaacgcgcacctgattgtttacaagttttaatgtgttcgtatgttactgcaggcatattcaaaatcctcacattctttttatataattaacattgcatcgccaaaactaaagaatctatattctaaatttactgccgttttataagcattcagaacattttcacgactactaaacgctgatactagcataactaatgttgattttggtaaatgaaaattagtaatctggccatcaattgctttaaaatcaaatcctggataaataaatatattagtccagccactcgtttcaacaaatttatcatgatcgcgtcgaattgtttcaagtgtacgtgttgaagttgtaccaactgatataatgcgatgtcctttggacttagtatcatttaataaatcagctgtttcttgtgtcatttgataatattcactatgcatttcgtggtcattcacatcgtctacgctcaccggtctaaacgtacctaacccaacatgtaatgtaacaaatgcgatattaacacctttatttttaatttcaattaataactcatcagtaaaatgtaatcctgctgttggtgctgccgctgaaccactttctttagcgtaaactgtttgataacgatctggatcatctaaacgttctttgatgtatggtggcagtggcatttcccctaattcatctaatctttcttgtaaaataccttcataatgtaaacgcatgatgcgtccaccttgatccatttcttttatgcattcagctataattttgccattaccaaaattcaatttattaccaactttaatacgcttagctggtttcagtaagacttcccaatcattaccttcaatttgagttaacattaacatttcaacttttgcaccagtttcttcttttaaaccaaaaagtctagctggcattactcgcgtatcgttaagcactaatgtatcaccaggtctaaaatactcaatgatatctttgaaatgtaaatgtttcatttcaccagtttctctatccatgactaataaacgactatgatcacgatcttttaaaggcgtttgagcaattaatgattctggtaagtcatagtcaaattcttcaatattcacgttattctctctcctcattcgactttgcaaaatgttcataagctaatggtgttgcttttctgccacgtggcgtacgttctaaaaagcctttctgaataagaaatggctcataaacgtcctcaattgtaatacgttcttcaccaattgttacggcaatcgtatctaaaccaacaggtccgccattatactgcttaataatacagttcatcattttatgatcaatgtaatctagtccgtgttgatcaacttgaagtaaacctaatgcgtgcttcgttgtttcaatgtatatttgttcatcttcattcacttgctggaagtctcttacccgcttcaatagtcgatttgctactcttggagtccctctagaacgtttagcaagttcaatggcactttcttcatcaatacctgtgcctaaaacctcagctgttctaataatgatttcttttaaatctgattcgttataatattctaatcttaagtgcacaccaaatcgatcccttagtggacctgttaagctgccagctcgcgttgttgcacctaccaaagtgaatggaggtaagtcgatacggatacttctagcctcatcgcctttaccaatgataatatctaaaaagaaatcttccattgcagggtataacacttcttcaacaacactactcagtctgtgtatttcatcaataaacaaaacatctccaggttgaagtcctgataaaattgcagccaaatcaccaggtctttctaatgaaggccctgatactgtacgtatattaacttccatttcattggcaatgatattagataatgttgtcttacctaatccaggggggccaaaaagcaatacatgatctaatggttcatgacgaagtttagccgctttaataaatacttctaaattactttttattgaattttgaccaatatattgtcgtaatctcgtaggtctaagcgacaattcgaaatcagtttcttcactatgcattgattgatcaaccatacgctcattcatgacaacacttcccctattaatctatttaaaattaagatacaactaattgaagacctgccttaacagcttcatcaactgagtcatatttatttttatttaacgttttctcaacttttgcaagctctcgtttagaataacctaatgcttctaacgctaacattgcttcttgcacgaattgatcttgcaccgtcgaagtagcgtctacttgtaataatgaatcgctatcttcttcagtaattttcactttaccttttaaatctaagacaatctgtcttgccgttttcttaccaattcctgggaatttagttaaatacgtatcattttcattttcaatggcacgttttacttcattaggcgtacttgtcgctaaaatagctaaagctgatttcggaccaataccagtaactttaattaaactcaagaacatatctttctcttcttcactactaaatccatacaataattgtgcatcttcacgaacaattaaagatgtatgaattaaaacttcatgatctagatgcttttgaaaacgataagaatttggtgtttgaatttcataaccaacaccagcagtttcaacaactacgtgtgtaggatataaatgtgttaacttacctttgacatacgcgtacattataggcacatccttacatactcatactaattaattctacttttgatacataatctaaatttctcaaagcgccaataacatcttctactgaagtttctttagatttagcattcagtgataatgttattgttgctttttcttccattggaatactttgatgaatcgttaatacagatagttctaactttgatataacatctagtacacgtgccaacataccaacaatatcagttacatataaaattaatgtaaattctcgatggtcaagcattttatcgtctactggaaatatcgtttctctatatttataaaaagcacttctagatagatcaaactgtttaacggcatcataaatggacaatgtcggatcactttttaaggcatctttaatcttcaatgttttaaccacggattcaggcaagacatcttctctaattaaataaaactttttataatctttattgtccatcatgtttcgctcctattcaacgaattcaaattctccgccaagaattctaacgatatcaccatttttacaaccacgttctctaagcgcatcatcaatacccatcgaacgcatttgacgagcaaatcgacgtactgctggatcactgttaaagtcagtcattttaaacattctttcaatagcattaccacttaccacataagcaccatcatcatctcttgaaattgtaaatttatcttgtgacggtgtatgtttatataatactcggttaatgccaactgactcctcttcttcaactgtgaagtcaacatctttatattcttctaatttatctgctattgcatataataattgatcaatattatcacgcgttattgttgaaactggaataactggcacatcttcgccaatttcttctttaaacaagtttaaattatcttgtgattcaggtaaatccatcttgttagctactacgatttgaggtctatcttctaaacgttgctcgtacgcagctaattcttgattaatgactttataatcttcaataggttctctaccttcagaaccgctcatatcaatcatgtgaacaataacttttgttctctctacatgtcttaaaaattgatgtcctaatccaacgccatcagatgcaccttcaattaaacctggtaaatctgccataacaaaactacgttgatcaggcgttgaaacaacacctagatttggtttaatcgttgtaaaatgatatgccccaattttaggcttagcttttgaaacgatagataataaagtcgatttacccacactagggaaacctactaatcctacatcagctaataatttcaattctaaagatacatctaattcctcacctggttcacctttttcactgaagtcaggtgcagggtttctaggtgttgcaaaacgtgaattacctcggccacctcgaccgcccttcgctactacagctctttgaccatcttcaacaagatctgctaacacttcgtctgtttcaacatttttaataattgtaccaggtggaacttttaatactaaatcttccgcatttttaccatgcatattactactttggccattttcacctttgcttgctttaaaatgacgttgatatctaaaatctaataacgttcttaaaccttcatccacttcaaatacgactgaagcacctttaccaccgtcaccgccagctggtccaccaaatggtacatatttttctcttctgtatgcggtaataccattaccaccatcaccggctttaagagatattttgacttgatcgacaaacatatatctcacctcttttacatataattttcattttcccaataattatagcatattagagccccttatatattgtaaataattaggggctcttatgcagttacttttataaatctttgctttaaaatacttatatttctcagcaccaattgtggtacagtttattctttaaacgctgcaactgtattcctttgtcccccttatagtttagtgattaggggctcttatacagttgcacatttagtataacgtctaaaattcccattttttaataacataatgaaaataataatgaaaaacattttataaaaagtaaaaaacaccagaagattcacttctggtgttaactagacaaaattattcagctactgcatatacagaaacttgttttttgtcgcgacctttacgttcgaatttaacaacgccgtcgattttagcgaataatgtatcatcgccaccacgacctacattttcaccagggtaaattttagtaccacgttggcgatataaaattgaaccacctgttacgaattgaccgtcagcacgtttagcacctaagcgttttgattcagagtcacgtccgttttttgtagaacttaccccttttttagatgcgaagaattgtaagtttaattttaacatcggaatgcacctcacttataatttaatctaatattctcattatattcttcttcaatagtttgtaaagacacaagcattgtttgaagaattagttgcgcttcatcgttgtttgtatcaacgcttcttatatgaaaatgaccaccattgtcgtcataattgatatctggtctctcagatgtcaatcctataatcgcattaacactaccaaacaatacagctgaagctccagcacaaacgatatcatgaccatattcaccatggtcagcatggccatccataataacgtctgttactttgccttcatcattaactgtaatatcaacagtaatcataataattacgcgttgattttatcgattgttaatttagtgtatggttgacgatggccttttttacgttttgaatttttacgacgtttgtatgtgaatacagtgatttttttaccgcgaccttgtttattaacagtagcagtaactgttgcaccttcaactgttggcgctccaactttaactgaatctccacctacaaataatactttatcaaatgtaaaagtatctccttcgtttacgtctaatttttcaacgaagatttcttgaccttcttctactttgatttgttttccacctgtttcaataatagcaaacatactttgcacctcctgtataataagtcacgccatacataggtgacatttcgttattgagtcaagcgtttgcactctgtgggaaaatcgctttcttcattaaaaatgttcttgaacctatatttgagcggttgtatgtagctacttataactactcaactattgcatcttaccattgacgacgtttcatgtcaatgtcattgtttgtttttttaaggaactttataatcaacggataaagcataatcaacagtacaaaattcataattaatgttggcaataatctaaagactacaaaatgaataatatcaaattgaatgaatcctaacataccgtatattaatgccacatagacttctaataataaggtgctggctaatataataatgaataacatcgaatgatctttgtaaaaaattttaaagaatcgatctataagtgctaaaaacaatatatagccaaataagtacactccataaatactaccaaagtatacatcagtcattacgcctaaaaatatgctgagcaataatgatacgccaaagccacgatacactaccatcattaaaatatacataaatgtaaggtgtggtacaaatacaagttcaaacttacctatgtgcattggaataagaagcccaattgcagtatctatataaaatagtaaaatacctatcaaaaaataatacagtgtacgcattatttatccctgctttcatcatcaggaattgttttaggatctctttttgcaacataaacatgactcaaatctgttaagtccgcaccagtcttaaccctaacttctttagctaagccgtattgatcattttgaaccttagtcacttctcctatatataaattacttggtagttgatcagctaatccacttgtaacgactttatcaccttttgagatattatctctattattaatgtcactaattacaagttctgagttcttttcatcataacgatcaattaaaccaaatatatttttagaaccgtgttgtatatttacagataatttacccgcacgtgtattagttgagattaaatcaacttgtgaagaaaatttattaactttagtaactcttccaacaaaaccttgtgatgtcatcacagccatatttgaagttatacctgatttagatcccttatcaattacaattgtattcatccactgatccggatttcttgccaaaaccgtagtagaaataggatcaaattttgaaatatcttttaaatcaagctctttttttaatttttcattttccgcttctaattgttggttcttagattctaactggctaatcttatttttagattctttagaatctccttttttaaaaaagtccccaatcgtaccagcaacaaaattaactggataactcacaactcgttgtccaaaagacacagaatcacctatatattgttcaggaggtgattgagattgtgaacgtatggacagcccaattaatgcaataaaaacgataattgcacataaaacaacaattaatttgttatttttaaaaaacttaagcacccagaacacctctattatgtcaaaatattgtatatccttttctattttatattactcccattatgaaataaagcactaactacgaattactttgaaaatgaacaactccgtaaaaaatttgtggcattttaaaaacaaaaaaactactagcaaacattccagtcactagtagtttaaataatcgatttaaattttaaaattatttgtttgtatcgttcgaggattcactgttcgaattctgaagttgtctccaacgtgcgaataagttctgggccttttgttgttcattagcttgtttctgttttgattgttctgccatttgaactacaccaaccttttaaatttattctagtgacaggataactaaaatatatttcttatgcaataatttcctattgataagcattttcagattttagttgtaaattttgccctaattcatttaagtcttgttgcatttcaaattcagtattgtaaacacgcattgactcatctccaaatttataaagaataaattcgtctcctctttgacctataatatattgatcattataagccatgcgattcattccagacacagccataaactcttgtttatctatcattttaaatacatttttaatttggcttaatggtacattctttattaaatcattttcttttaatgaatatttctcaccacttacataaacatgttgggcatcattagtgggttgcgtaacttgattcatttgatcattatcgtgatttacaggattccaatcttgttcttttaaaaaaggtgcgtatttcaaggcgatataaacaattatcacaattgctattactgctataatgtttttaatcatactaaatatcaatctcatagttcgcctccaatgtcttcatctaattatatattttattatgtatattttcctcagtcttcagccttaatcatgatatatcttaggactgatgcacgttcatttaaaatagcttataattttgttatgatttaaaagcgtattaggaggtttgtagcattgagtatactaacaattattttaatagcactattagtcatcctcctttttagagttggactttctattttgcgatttttaatttatgtcggacttgttttattatgtatttacttaggatatcaaggtttaatttggttgctcgatttttttcaaataaatagtggatttttaccgcactttcaatttaacaattaaatttattctgcataacaaaactcctaatgtactagtttagaattttttaactagttccacattaggagttttagtttgttttcaagcacggatactacttgatgaacagattactattacttacgcccaaatgcgttagataaaaatcgtatcagcgcgtagctaccacttagtaaaaggccccaaacgattccagtaaaaattgagccaattgctacacttaataaaggaaaagcttgtttcgtaacgattacacctgctaacgcggttactaaaatacctaacgtagataaagctaatgttattaaaagattgcgctttgttacaggttcatttttaatatttaactgcatggtataaaccattggcacgagaaccccgataataataaatagagtcactatttttcctccaatgaaagtacttcgtaggtattatacacaagatacgtcattaattctatcaacttcaatcattttcatcaaagtaacccgcttctacaagactggtaaatctattatcaccgattataatatgatccaataaatctatccctaaaatcaaaccacactccttcaacctcattgttgttatgatatcttcttgtgagggcgttacatcaccggatggatgattatgaactgcgatgattgcattggcattttctctcaccgcaatactaaaaatttcacgtggatgtacaatcgaactatttaatgtacctttaaaaacacaggtttctttaatcactacattttttgaatttaacaataaaatgacaaaatgttcttgtgttaaatctttcattgttggaatcatataatcagcaacatcacttggttgcgttatttttatacgattattttcagctcttctccccatcctttcccctaactcaaatgctgcttttaaagtaattgctttttgtaatccaatccctttaacttttatcaaatcgttaattgaagattttttcaattcattcagattcgaagcagatttaagcagttcattactaatgtctatgctcgagaatccttttcttccggtgttaattaatatagctaataattctgtattcgaaagactttttgcaccatggcttaacaaacgttctcttggcatttctgaagttaccatttctttaattttcaaaaatatacgcctcctaaaaattgatggatatcattataaaaaagtgaattgataaaaaaggaaataaatataaatggaacaaggggtaatagtttaatcggcttaaatatcatggtaattaaagcaactaaaccagcaatgacaaatgtaaataaaatgacataaatagtgaattggagagggaaaaacaaagaaagtgcagatattagtaaaacgtcaccataaccaatatatgcccgaaataaaaagtagaatatatgcgtggtcatactaataatgataaaagctactggataaatcatacttaacgagagagaaacgatacaataaattataattaagcgacaatctaacattaaagaagtgatatcggtcatagtaaaaataagcagaaaaacatatgtagttataaatagcgtagcatttacgtatgtgaaatcatacttaataaagacgataggtattaaagcaaaggtttcccctaagaaatgtgttagggaaatacgctttcgacagtttcgacatcgcccttttaataataaaaaactaataatcggcattaattcataccatttgagtgacgaattacaataatcacatttcgatcttctatgtaaataatcaaatgacgtttcttctatagatataaattgatatagaaaactaaaaatacaactgcaactataagataacaatactaccaaatgacaacctccttatgtaaattatagttagttattaccaaaatgtaaatatacactatttttcaagaattgaaccgctttttcatttaaatttttcaatattgctaagcataattgatggatactttaacaacccattactgctcggcaaaattaataatggcaagaaattgaaccttataaacacatacgatttagagcataaaaaataaccatgaagctctacctattgattaaatagattcttcatggctattttagttttagttttataatgcttcaaagtctaattttgatttaacttcacttatgaaatacagactaccggtaattactaatgtatcaccttgataattttttataaattcaacgtagtcatctactaattgtatttcatcattttcaatactacctacaatttcttctttgcgtaacgctttcggaaaatcaaattcagttgcataaaacgtatgcgcaattaaacttaaatgtttgaccatctcgttaatcggttttccgtttattgctgagaacaaaatatctactttttctttatcatggtactgtttaattgtatcaattagagcatctatactctctgaattatgtgcgccatccaaaatgattaaaggtttgtcatgcacctgctcaatacgtccagtccaacgaactgattcaataccgtctatcatcttattgaaatctaattcaattaatccttgttcatttaattcaataagagctgttatggctaatgcagcattttgtttctgatgttcacctaacatgcttaaaatgattgtttctaattcataatctttataacggtaagtaaattcatcattttgcgatacaacaacaatttctctatctaattcaattggctttgcatgttgttcaattgcgcgttcacgaacatattttaatgcatcttcatttttaacagcatatatcactggaacgttaggctttataatcgcgcctttatccctagcaatatctagataagtaccacctaaaatatctgtatggtctagaccgatactagttaagattgataaaaccggtgtaaagacatttgtcgaatcgttctttatacccaatccagcctcaacaatgacaaaatcaacaggatgtatttcaccaaaatataaaaacatcatcgctgtgattatttcgaattcagttgcaacacctaaatctgtttcacgttccatcatttcacttactggtttaatacgtgatactaattctacaatagcgtcatttgatattggcacaccatttagactaattcgttcattaaatgtttcaataaacggcgacgtaaatgtacctacttcataaccattttcaactaaagctgttctaaggtaagcaactgtagagcctttaccatttgtgccacctacatgaatacccttaatgttattttgaggattattaaattgtgctagcatccattccatacgtttaacacctggtttgatgccaaatttagttctttcgtgtatccaatacaagctctctaggtaattcattgttactaactcctatgcttttaattgttcaattcttgccttcacaccatcatatttttcttgataatcttgttttttacgtttttcttcatttataaccttttcaggtgctttacttacaaagttttcattagagagctttttatctactctatctaattcgctttgaagtttagctaattctttttccaaacggctgatttccttatccatatcaattagcccttctaatggtaataccactttacctgcaattacaactgatgtcattgctttctcaggaatttccacgtcagtgctaatatttaaggtactaggattacagaatttgattaaataatctttgttttgtgataaagttgtttcaatttctttatctttagcttgaattaaaataggtatttctttagacaatggcgtatttacttctacacgtgattgtcttacagatttaatgatttcaacaagttgttgcattgtttgtttactttcttcaaaaatcaatgattcacgcacttctggccatgaagctttaacaattgtgtcaccttcatgtggtaaactttgccatattttctctgttacaaatggcatgaatggatgtagcattctcataatattgtctaaagtataactcaatactgaacgtgtaacttgtttttgttcttcatcattactattcattggaattttactcatttcaatgtaccaatcacagaaatcatcccaaatgaaattatataatgcacgtccaacttcgccgaattcatatttgtcacttaaatcagtaactgttgcaatcgtttcatttaaacgtgttagaatccatttatctgctaatgataagttaccacttaaatcgatatcttcaactttaaagtcttcaccgatattcattaaactgaaacgtgccccattccagattttattgataaagttccacactgactcaactttttcagttgagtatcttaaatcatgtcctggagatgaacctgttgctaagaagtaacgcaagctatcagcaccgtattcgtcaataacatccattggatccacaccattacctaatgatttactcatcttacgcccgtcttcagcacgaactaaaccgtgtaataatacatcattaaatggacgacgatctgtaaattctaagccttggaatatcatgcgtgctacccagaaaaagataatatcgtaacctgtaactaaggcatttgttgggtagtatcgtttaaagtcttcactttctaaatcaggccaacctaacgtagagaaaggccataaagcacttgagaaccacgtatctaatacatcttcatcttgttgccaattttcaatatcagttggcgcttcttctccaacatatatttcgcctgtttctttatgataccaagccggaatttgatgaccccaccataattgtcttgaaatcgtccaatctctaatattttccatccattggttaaatgtatgttcgaaacgttgcggataaaaatcaatacgatcatctgttttttggttatctaatgaacgtttcgctaagtcttccatgcgcacaaaccattgtgttgataaatatggttcaacaacagcgccagatcgttctgaatgacctacagaatgaacatgatcttcaatcttgataactaaatcttgttcttttaaatctttaactagctgtttacgacaatcaaaacggtccataccttcatatttacccgctttgtcgttcattttaccattttcatccataacgataatattttctaattgatgtctttgaccaatttcaaaatcattagggtcatgtgctggtgtcactttcatagcaccagaaccgaagtctatatcaacatactcatctgctaaaataggcagttcgcgtcctacgattggtaatataacagttttaccgattacatctttgtatcgttcgtcattagggttaacaacaatcgctgtatcacctaacatcgtttctggtcttgttgttgcaatttcaataaaaccttcaccatcagcgtaaggatatttaaaatgataaaacgcaccttgaacatcttcatgtattacttcaatatcagataaagctgtacgtgctttaggatcccaatttataatacgttcgccacgataaataattcctttattgtataaatcaacaaaaacttttttaactgctttacttaaaccttcatctaaagtaaaacgttctctactataatctaaacctagacctaatttagcccattgcgcacgaataaatgacgcatactcttctttccaatcccatgcctgttctaaaaacttttcacgaccaagatcatatctagttattccttgttcatttaatttagcttctacctttgcctgtgtcgcaataccagcatgatccatacctggtaagtataacgtatcgtatccttgcatacgtttcatacgtgtaatgatatcttgtaaagtcgtatcccatgcatgtcctaaatgtaatttaccagttacatttggtggcgggataacaattgtatatgtttcttttgatttatcttctgacggtttaaaataaccattctttacccattcttcataacgtcccgcttcaacttcacgaggatcatattttggtttcatttccatttgctatacctcctaaaaaaataaaaatatccatcctatatacaaataggacggatattccgtggtaccacctatattcaagaaggatgattaatatcaaattcactcttttaacataattggaataatcataccaatactatcatcgtgaaatttgaaatgcttcatctcttcaagcactctagattatgattaacgctcaaacacgtcttagcctactattaatcacgttcagctaagatactctgtgggctaccttcagtaaaaatcatttacatactcacaccaaatcatatgctctctttaaaataatttgaacttactcttcccaaatcctatattaaactcttaacttatagtataatgattgacaaaataagtcaatgtataggtgggaataaaatgaatgaatgcgcatttggtactaaagatccagtctacttagactatcatgatcatgtatggggacaaccgctctatgatagcaaggcattgtttaaacttttagcattagaatcacaacatgctgggctatcttggttaactattttaaaaaagaaagaagcctatgaagaagcattttatgatttcgaaccagaaaaggtagcacaaatgaccgctcaagatatcgaccgcttaatgacttttccaaatatcgttcatcatcgtaaaaaattagaagcaattgttaatcaagctcaagggtatttaaaaattgaacaagcatatggtagttttagtaaatttttatggtcatatgtaaatggtaagcctaaagatttgcagtatgaacatgcttctgatcgtatcacagttgatgatactgcaacacaactatctaaagatttaaaacaatacgggtttaaatttttaggtccagtaacagtattttcgtttttagaagcagccggtttatatgatgcacatttacaagattgtccatcaaagcctaaacataattaatttgctatagcatcataaagtaaacgagacatcatctatttttaactaatagactgtctcgttttttaatgtgaaaatttattcaaatcataagttaaagttccaagttaatgctctgctaatattagatatcttaatctaaaaatagatgtacaacctttgcttaaaccttaataatgaattctatcctaagcataattcaacttagatggatgatagtttctaatcttcacgcttattcgaacgatattttaaaaagtaattaattcctggtgcaataataaataggatgaaaaagattcggaaaatatgataactcgtaatcatagcaacatcggcaccagtagctaatgcaactaaaactatctgattaacccctcctggtgctgcaccaagaaacaattcattaataggattattatcaaagaaatgtatgatataaaccatgattagcgcaccaattatcaacataatattttgaattgtaattgcgattgctagtctaccttttaaatctgacaataaatgcgcaatttgaactccaattctaatcatatatattagttgtgccatgttcaacaaccaatgatctagtgtaaatgttaaacctgtagaaaaattccaaacaattaatacaatgagtggtgctaataattgaaatgttggaaactttattttagacataattagataaactataaagatagctatcgctaaaataactatttgccctatgtttaatacttgtgataaaggcaagacttttgttaactttccattcgcatgcatgttaccatcatgaaaaaaatatgaaatgaacggtactaaaacaacaacaaatataattcgtgatgtttgcgttaagctaacaactaacaaattagcacgtttgtcttgttcagccatgaccagcatttgtgttagtgctcctggtataacacttaaaatagctgtttctgtattaatacgtgcaatttttttaaaaacaaatgccattactattgcaattaataatatcgaaatagatacaacaataatcgaaagccaattgtttttaatatccataacgacatttttcgtaaacgttgatccgatttgcacacctaatagtacaatacctaattcactaagtaagaatggccatttaatatcaagtttgaaaacttttacacaaatgattgatgcgataataggaccaaacataaatggaagtaatacgtgcgatgaatacagtagaatactaataaaaaatgataaaacgaacacaatgaaattatttctatatatcattgccatgttttccacttctttcaataaaaaataaaatgactaaattgctgcttgagcttcacgtttgttaagataacaatatccgctagcagttttgactacaaagcatatatggactttcactatcaagtcgccgcccatgccttatatacatttaaaaagagcctgaacaaagttcaggctctcaatttgtccgtatatttattttacaatacgacttaaagccgtatcaaatgcttgaatcgttttttcaatatcttctttcgtgtgtgccgtagataagaatgtaccttcaaattgagatggtggtaaaaacacaccttcttttgccatttctcgatacatttctgcaaataatttcaaatcacttttattcgcttgttcaaaattagttacaggtccttcatttaagaaataaccaatcattgaacctgctctatttacagttattggtacattgtgtttagcaaatacacgttttaaaccgtcttcaagtatatcgcctaacatattaaaatactcatatgtctctggcgttaattggcttaacgtttcataaccacttgtcattgcaagaggatttcctgataacgtacccgcttgataaatatttcctaatggtgctatatgatccatgatttcttttttaccaccaaatgcacctacaggtagtcctccaccgataacttttcctaagcaagttaaatctggtgtcacaccaaagtaaccttgtgcacaatgataaccgactctgaaaccagtcattacttcatcgaaaattagcaatgcgccgtattcagtcgtaatatctcttaatccctgtaaaaaaccttcaatcggcggtacgacacccatattaccagcaacaggttctacgattacaccagcaatatcgtttccaaatttttcgaaagcgattttaagtgcatctaaatcattgtatggaactgtaattgtatttttagcaataccttcaggcacaccaggagaatccggcaatcctaatgttgccaccccagaaccagctttgattaataacgaatcactatgaccatgatagcaaccttcaaatttcacaattttatttctgccagtataaccacgtgctaatcttaaagtatccaatgtagcttctgtaccagatgacaccatacgcactttttctattgaaggtactcggtcaataacgagctgcgccaatttattttcaagtaatgttgatgcaccaaaacttgtacctttatcaattgcttcatgtaaatgactaataacttgagggtctctatgtcctaaaataagtggtccccaacttagtacatagtcgatatactcgttaccatcgatatcataaatttttgaacctttaccgtgatccataaaaattgctggtgtatctactgatttaaatgcgcgtactggactatttacaccaccaggcattaaagtttcagcaaccttcattgcttcttctgatttcgtatatctcataaagtaaattcctcctacagtttatggaaaatcataaatataaaaccttatttatctaaatagcgacaaatgtcctttgcaaaatacgtaataatcatatcagcacctgcacgtttcattgaaaccatttgttccataacgacacgttcttcatctatccaaccattttgtgccgctgctttagtcatactatattctccactcacattatatgcaacaactggaacattcgtatgatttttaacatctcgaactatatctaaataacttagagcaggtttaacaatcatcatgtcgcacccttctttaagatcactttctaattcacgaagtgcttccaaacggttagcagggtccatctgatacgtttttctatccccaaatgatggcgctgaatctgctgcatctctaaaaggtccaaagaaacttgatgcatacttgacaccataactcattataggaatattgtaatagccggcttcatctaatccacgacgaatttcagcaacaaaaccatccatcatattacttggcgcaataatatcagcaccagcttccacttgagaaattgctgttttaacaagtagtggcaatgatttatcattgtcaacgtcatgtgtatggtcatcaatcacgccacaatgaccatgatcagtatattcacataaacaagtgtctgcaacaattaataagtcatcatacatttttttagcaatacgtgttgcctgttgaataacaccatcgtgaatgtatgcaccagtacctatatcatcttttgagtttggaacaccgaaaaacataatggcacgtatgcctaagtcataagcttcttttaattcactttcaagtaaattcaaactgatttggtatacacctggcaatgacttaatttcttttttcacatcgtctttttcaactacaaaaattggatatattaaatcttcttttcttacatgattctctctaaccatatctctcattgtcgctgatgatctcaatcttctatgtctatcaaatttcatttttagcccctactttctaaaatcttttcaattagtgattcgagtgtttgaatttctgcaattgttactggttgttgatatgatttaatggtccgtgctgtttgttctccaatagcaaaatacgacttgaattttggtacaaatccttcattaaaataataacgtactgccgacgaacttgaaaatgttaatgcatcgatttgttgatgttctatcatttctttaacatcttgtatattttgtttgttaggcactgaagtatataaatctattttaacaacttcattatctttagataacgctgctaataacaatggtctcgccaattcactcgaaggcaaaagtattttttggttagtttgattaaatgattttaaaaatccttcttgagaaaagtcgtttggcataaaatcaactcgaatgccaagtgattcacaatattgcgctgtcttacttcctatcacagcaatgttatcaacattaattccttttagatatttataaaagaatttcacagcatttttagatgaaaaaataagccagtcatagcgttgatttaacaaatgaatatcaaaatttagtggctttatatcaataaagggtttgtgaataattgatactaaatcactttgcatgtcatttgtttgtgtcataactacaactggcttcatatttaaacgtcactccattatttaatgttgttcatttaagcgttttataatttcataagcaccttgctcttttaatttgttactcactgttttgcctaactcaaccggatctgttccgttcattgtatattcaaatcgttctttaccatctggggtcataattaaacctgtaaattcgatttcgttttgatctgagattgtagcatatcctgcaattggcacctgacaactaccatccatttctgctaaaaacgttcgttcagcagtcacacattttgcaacctcatcattatgtactttgcttaataatgttaatagttcttcatcgtcactacgacattctatccctaaagcaccttgtccgattgcaggtaacaatgtatctctatcaagataagatgttacaatatcatctgaccagcccattcttcttaaaccagctgcagctaaaataatcgcatcataatcttcagtttgtaacttttctaatcgtgtatctatattacctctaatccatttaatctctaaattaggatacttagataatatttgtgcaccacgacgtaatgaactagtaccaataatactgccttctggcaattgggatagtggtgtatgtgttttagaaatatacgcatcaaaaggtaattctctatcagggatacaacctaatgttaaaccttccggaattacacttggtacgtctttaagcgagtgtattgccatatcgatatttttttcaaaaagttcatgttgtatttctttaacaaataagcctttgcctccgactttagacaattgtttatctactatacgatcgcctttcgtgacaatttctttaatttcaatttctagatttggctcgacagcttttaatttatcaataaattgctggctttgtgttaaagctaatttacttcttctggagccaacgactaatttacgcatgttcaattcctcctaggaacggattgctctagattattttctcaattcacaaaatgtgttgcaaaaaataaattaatcatatttaagcaaaataaaataatgttatagtatattaaatatcttgaattcaaccatttgttgattctaagtaaaatataacttccatataatactgtaataattgaagagagtattaccttcgggtcaatgaatatacgttcaccaactgaaattacaccccactgtgtacctaaaataatactaaatatgagaattatccacccacttaacgttgagtaaaacacaattgattcaagtgtagcaacgctaccaattctaaagtatttttgatcaaaacgtttttccttcaaattacggtattgcatgatatacagtaatgcattgacaaaagctaaggcaaagaagacataacttaacacagctagaccgatatggactaacagtaactcgtctacaacagcaattttctgaaccttattagtataatgtgtcggttgaaatgtattcatccctaaaagtgttaaccctattaaattcaagaaaaacacagagaaattcaaaactttgataaggttaagaattaaagagattgaaataatcagccaacttaaagtatagaatacatctgaaatagaccctaatggaatatgtctagtttgtataataaaaatagataaagagattgtttgtaaaacccaaacaatccccaataaatatatgcctaaacttctaatcttatgacttttttgtacaaaatcataaaaatagcaaatgatactgattaagtatattaataatataatttcattgaatcgaataaacaggttttcttgcatattatcaccatattaatatgcttattcaaaactaaagatacgtcgcgctgaaatttccttgaccttgctttctttttgttgcttcgcttgctcatgaggacattcagcttcgatatcaaatatattttgaaatagctctaatttttcattacttttcttatcactacttaattctttggcctgtttaataggatctttcaacatttgattgatgatactttttgtatgtttagatataattttacgttctctttcgcttaaccctggcaatttacgatcaatactgtccatcgtttctgcttgaattgccatagctttttcacgtaaagctctaatcactggaacaacacccaacatactaatccactcattgtgtgcatgtatttctgcaggaatttgttccgaaattgttgcagccgctaattgtcgctcacgtaagtttgcatcaactaaaccttttaagtcatcaacatcataattaaagatgtttgtgatggcactaataccaggttcaatatctcgaggaactgcaatatcaatcaatactagtgaatcttgctttctattttctgcaattctttctatcatttcatttgtaatgatataagattgtgcactcgttgaactaatcacaatatctgcactttcaagtaaatttggtaatgatgatagttcatcatatttcacttgatgctttgctgctaatttcatagcattttcaattgttctatttactactgtaatatcagtaattccagaaccaagaagatttaatagtgataattcactcatttcccctgcaccaataatgatagcttgcttacttttcaatttgccaaatacttttttcgccaactcgaccgcagcataagacacacttacagcattatcagctatatctgtttcattatgtgctctttttgcaaaagtaattgcctgtttaaatagatgattaaaaattgttcctgtcgtacctgtgctttgcgctaagaaaaatgcatctcttatttgacctaaaatttgagtttctccaagtacgattgaatctaaaccagaagtgacacgcaataaatgttctactgcttcgtcccccacttttacttctgacattgctttaatatcatctacttcaaatccaaatgcacgagctagaaatcgttgaatatagtaacgacctgtgtgaatttgatcaacaacagcatatacttcagttcgattacatgttgataatatgacattttctaaaatagatttagtttcatataaatcttcatgggcaattcgtaaggcatcatctctaaaagcaacttgctctcttagtgcaacatcagctgtgcgatgatttatactaattgcaataaaatgcatttgaaacgcccccatatatactaacaatacaaatattataacataatttaaaatccaattaagtacgatgcttaaataaattataatctttctaatttacttttgagtttttgacaaaatgatgaacgttgaaaaatgttatcaattgtgtactaattaaaagtttcgtgcttacattatttttaaaatttttgtataagttttgacgtacaaaaactatgaaatatacggttcaattaaattccatatttgttgttgtttattattttgaattgatgaataacttacaattgtatcgtctgggtccatatctaattgtgtcttaatatttttaatatgcttttgaaccttaccttttggaattttgtcttctttagtgcatataactaaagtaggaatatcaaaatgtttcaaataattgtacattaagatatcatcttgtgttggatcatgtcttaaatcaactaattgaataactaattgcaaattctctctcttagttatatattcctcaatcattttcccaaatttttcacgttgtgttttacttactttagcatatccataccctggaacatccacaaaaataagttgttcatctatattataaaaatttaacgtttgcgttttgccgggttgctgtgatgtacgtgccatattttttctgccaatcatactattgataaatgtagacttacctacattagatcgaccgctcagtgcaacttcagacaattctgtttctggatattgttcttcttttactgcactaatgattaattctatattattaggattaactttcattttatatcctcacttttttatattctctttcaattctaccattatataatatttgaacctttcggtatacattataaaaaagctccgatcaaagttaaactatttgagcgtcaactttgattggagcttttcacttttataacacatcaatgattaagctgatgttttactattattaattaaattgccttctgcgtcgtatagttctggttcagtttcttcattaattgtttgtgctgtaataactaccttcgttacattttcgttagaaggcacatcaaacataatatcgattaacgattcttctatgattgaacgtaaaccacgcgcacctgtttttctttcaattgctttttcactaattgctgataaagcttcttcagtgaactctaaatccacatcatctaattccagcattttagtatattgtttcacaagtgcatttttaggttgcgttaagatgtttttcaacgcagttacatctaatgtttctaaattagctacaattggcacacgtccgataaattcaggaatcaaaccataggcttgcaaatcttctgggcgaatttgtgctaataatgcttgttcgtcatatttatcagcttcattgcttgagaaaccaataactttttcaccaagacggcgcttaatcacttcttcaataccatcaaaggcaccaccaagaataaataagatatttgttgtatcaatttgaatcatttcttggtttggatgtttgcgtccaccttgtggcggaacacttgcagtcgtaccttctaagattttaagcaatgcttgttgaacaccttcacctgaaacgtcacgtgttatagatgtgttttcagatttacgtgcaattttatcaatttcatctacataaataatacctttttcggctttatcaatgtcaaagtcagctgcttgaattaatctcaacaagatattttcaacatcatcgcctacataaccagcttcagttaaacttgtcgcatctgcaattgcaaatggtacattcaacgtcttggctaaggtttgagctaataatgttttaccactacctgttggcccaattaatgcaatgttacttttttgtaattcaacatcatcttcttttggtcctaattgttgaatacgcttatagtggttataaacagctacagctaaagattttttagctttttcttgaccaataacatattcgtttaaatgatccataatttctttaggagtaggtaattctgtcatcgcttcagaagtgttttgagctaattcttcttcgacgatttctgagcataattcaatacactcattacaaatatatacaccacttcctgctacaagtttttttacttgatcttggtcttttccgcagaaagagcatttcaaattttcttcatcttcattgaatttaaacattctttttacacccctattcgttaaagactatactagattggatgttacaatgcaacatattaacatacaaactttttgcttaaagaatagtagcagatacataagctatgcatctgctactcatttttgtaatttaatatttaatgaagattaatcttctttagttccttcaacgaactttgcgttatctcttaataaatcgataactttttggatacgaacatcatttttaatgatatcagtattacctaaagtatttttgatatcttcaactgagatattaaattgtttactcattttttctaattctttatcgatatcttcatcagtagcttcgattttttcagcttcagcgatcgcagttaaagttaagttagttttaacacgttgttctgcatcgtctttcatttgctctcttaattgagtttcatcttgacctgagatttggaagtacgtttgtaaatctaaaccttgttgttgaattctttgtgcaaattcagacaccatacgatctaattcagtattaaccattgcttcaggaatatcgattgttgtattatcagtagcttttgtaatcgcttcttctttttcaacattttcagcatctgtagctttttgttcagctaaacgtttacgtaagttttctttgtactcgtctactgtatttgcttctgcatctaattcattagcaatttcatctgttaattctgggacttctttaaatttaatttcgttaacttttgttttgaaagttgcttctttaccggctaattcttcagcatggtattcttctgggaatgttacgacaacatctttttcttcgtcaactttcataccttctaattgctcttcgaaaccaggtatgaatgaacctgaaccgatttctaaatcgtaaccttcagcttgtccaccttcgaattcttctccgtcaactgaaccactaaagtcgatgttaactgtgtcgccattttcaacaacaccatcttctttaacgaccatttcagctaaatgtcctaagctgtggtcaatcgcttcttgtaactcatcatcagataattcagtttcttgtttttcaatttcaagacctttatagtctcctaatttaacttctggctcaactgtaactgttgcttcaaaaatgaaatctttacctttttcaatttgagtaacacttacttctggttgtgcaactggtttaatatcagtttcgtcaattgcttcaccataagcatctggtaataaaatgtcgatagcatcttgatataatgcttctacaccaaagcgttgttcaaaaattggacgtggcactttacctttacggaatccaggtacgttaatttgtttaaccacttttttgaatgcttgatctaacgctttgtttactttttctgcaggaacagtaacagttaataaaccttcgttaccttcctttttttcccaagttgctgtcatgtatatatacctccatgattaactaatttattttttcaacttccctattatatcataggtctattccctatacaaacattgaaatcacaacgtttatatatttgtaaatcaacttttttcgtcaaaactatattaaaatgctgagtattattttgcaacaatttaactattattattcaaatctaattgctgaataaaattaaatgcatcgatactttgtaattcacatttaagtcctaacatatttttgaaataacattcgtatgcattaatccatttattcgtttcaaacaaagtttcaatatcaattggataaatcatgatagagtgattattcataatatggtgtgcttcttcagcgatatgtaaagcaccatcatttaatgtttccataacgttaggtataactttttctttaagtgttgtatgttctagcccttttaaattagctggtacaaaagttacatccataccatacttttcaattgtcagttcttgtgtacaatttgcgaaccttaaatactcaatcattaaactaatgaggttataactgtacgtattagattttaatatatataataccgtttcttgaaattgaaaatgaccattgtctattaacttcaaaatcaagtgcgtctgttccctcattgataacgtatcaaaatcagctaatgactgagtcaatcgtttttcatcttcaattaattttgacttagcaaattctttaagaggatgtaatgccattcttgttttgtgatctttgacttcatcaataatttgatgaattacttctaccgcttcaaaatattgtcccaaaccaatcaaacttttcacgtaataaatcatcaatgcatcatattgttgtatgccagttttcaataagacaattgtttcttctcttaattcaagaaatgaccccgtctcatataacatacggcatttcatcattgctatttcttcagtgagttcaaattgacgttcatattgcacaatatattcatacatcaggtcatagttttggtcttgttcagcacgttttatatctttatataactttttcgaagagttaggaaactgaataatatctgacatatatgtcacctcgtttgattataaatcttgaaggattaatgcactccacgtttcgaaatcatcatatgactctatgttgcctttttcaacccattttattcgtaaagtatctgtttctttagcttctacatcattcgtacttacagtgattttaaatacaacaccaatatgtaccttgcccacttcattattatcgtcattaataaaaccgatatattccatattttgtgaatcttgctcacttaaacctacttcttcttctaattctctctgtgcattaactctcaatacttcgttaatagattctgctcctggaacatcattcatatgaccgcctacacctattgaagattgtccatgcaatcgagcttctccaccgccagataatcgttcatacactaatatctcgccatgctcattttcaagtaaacaataagaaatgagttgtttatatgatggatcctcttccatatcgccgcgtcgcttaacttcatattgacttagcgcatcaaaaatattttgaccttctggtttattcttatttaaaaacccattgaaagtattcttttcattattaaaaataatttctctaggtactacaatgatttgttcatcaaatttagacatcgtataaaactcctcactttaatgtttgttctcttaaatgcattttagcaaatatgtcatattttagcgattaaatgtggcattttgctatttaaaaaataaaaaagagatgacaatgccatctcttttttataagtgttattattttaaagcatctttagctttagttactaattgagcaaatgctttttcgtcagaaattgcgatttctgataacattttacggttaatgtcgataccagcttttttcaaaccgttcattaaacgtgagtagctcatttcatgttgacgagctgctgcgttgatacgtgtaatccataatttacggaagtcacgtttacgttgacgacggtcacggaaagcatattgacctgatttcattacttgttgcttagctactttgtataatgtatgttttgaaccgaagtaacctttagctaatttaatcgtttttttacgacgcgctcttgttactgttccacctttaactcgtggcataaaaaattcctccttaggtaattcctaccgatttctgtatttgttcttattttttgtatgctaataattgttttacacgtttcatatcgctcttagacactaatctagctttacgtaattgacgtttttgtttagtgctcttgtttgcgaataagtgagatgtgaaagctcttgaacgttttaattgacctgaagcagttcttttaacacgtttagctgctccgcggtgagttttcatttttggcataatataagtcctcctgtaatagctttaattatttttcagctgttggcgctaacatgataaacatttgacgcccgtccattttaggtttttgttcaactgttgctatatctttgcattcatctgcatatttttctagcacacgttgaccaatttccttatgcgtaatggcacgccctctgaaacgaatagatactttacatttatcgcctttagttaagaatttacgtccgtttttcaacttcgtttggaaatcatgttcctcaattgttggacttaaacgaatttctttaacattgataattttttgtttctttttcatttctttttcttttttctgttgttcgaatttgaatttaccgtaatccataattcttgcaactggtggtttcgcattcggtgcaacgaccactaagtctaaatctacacgttcagccatttctaaagcttcacgctttgatttaacaccaatttgttcaccatcttgaccgattaaacgtaattcttttgcacgaattttgtcattgatttgagtttgatcttttgctatggttgacacctccaaaatttttacgaaatttgcaccaagcaaaaaggaagagcaggtataaaatacccgctcttccttatacacagttatgtgtaatgtgattaacctgccaactgctttatgcgtcgctacaggtgagaagcgggtgcttctacttggttcgtttcgtattcaacgttattaatcatatcaacaattcacatttaagtcaacactataactgtaattatttttattttaaccttttatttcatccattgacacgtcttgacgtaaatctacttgttctaatggaatttttttcgttttatatcgaagcttatgataaataaagaatgctaaaaatactggaattcccatatacgtaattaagaagcgactaaaattaaaatctcctgttttaataaagtcaacatcttgaccaataattactacaatacataaaaagccagcaaataatggtccgaatgggaataatttagcagtatattttaatttagatttgtcataattttgtttatcaaatgctcttctaaatcgataatgacttactgctatacctacccaagcaataaaaccagttaaaccacttgctgcaacgatatattcgtatgcaccttttgtaaggctttgtaatacgaaaattatcactacaatgattgctgtaacgagtaacgacatatatggcacaccgtttttatttgttttaccaaatgcttcaaacgctaatttatctttactcattgaatatagcattcgagttgaagcatacatacctgagttacctgctgataacacagacgttaaaatgactgcattcataaatgatgctgcaaacgcaaatccagcatttttaaacactaatgtgaatggagacgttgctacattatcactaccccccattaatgcactactatcataaggaattaacataccgataacaaaaatggctaaaatgtaaaataataaaattctccagaatacttgtttaattgctttcggcacagcacgttcaggattttctgattcaccagccgtaataccaattaactcagtaccttggaatgagaaaccagcgattaagaatacacctagaattgataacaaacttcctcctaagttgccaccaagaattggaccttcacctttattaaatatttcgaatcctacaacatgaccacccatgattccgacaatcgttaataaaccaattgcaatgaaaacaataactgtaaccacttttatcaatgccaaccagtattcactttcaccatagacgcgaactgataacgaattcagactaaaaattataactaagaacaacgcactccatgcccaagcgggtatgccttgcaatggtgtccaatattgaatgacttgtgctgcaatcgtaatatctgctgctacagtcactacccagttaaaccaatagttccaaccaagcgcaaaccctaaagatggatcaacaaatcttgtagcatatgtactaaatgaacctgatactggcaaatacgtagccatttcgccaagtgacgtcattaagaaaaataccattattccgataattgcgtatcctattaatgcacccaaagcacctgcatcatgaattgctccaccagaagttacaaataaacctgtaccaatacaacccccaatcgcaatcatagaaatatgacgatctttaagtccccttttgacaacattgttactttcattttgaacttttgacatataagctccctttccatgttttagaggccaagaaataaataacctttattcactttcatacccttttttacagaacatagtgatattaaaagtaaaaaagtggctacatacctttaagatatgcaaccactttggcaattatctatataaggtagcacatcacattctgtgacagtacagttcctattcgaaaactgtcccaatagatataatttatggtttatatctatttcggcatctttacctttcacttgttcaacttatgtaccataaatacttctgacaagttactaattaaacatgcaacctctaactcaatttaatattttaactaacttgtaatatacaggattcatcacgcataatcaaccctgtaaaacttgatacgcaataaaagttttaaagcattttattgcgacaactgtctatctatgttttttcaaacgaatttcatcaactagattccagataaattcatctttttcaactgtttcttggtcttgcgatccatattgacgcacattcacttgattattttcaacttccttatccccaactacgatttgataaggtattttttgcatttgagcttctctgattttataacccattttttcattacggtcatcaatacttacacgaacgccttgagatttcaattcatcttgtaattggcgcgcataatcataatgtaaatcaacgttaactggaatgatttgaacttgttttggcgctaaccaagttgggaatgcacctttagtttcttcagttaaaaatgctacaaatcgttccattgttgatacaacaccacgatgaataacaactggacgatgatgttcaccatcttgaccaatataagttaaatcaaaacgttctggtaataagaaatcaagttgtgctgttgataatgtctcttctttacccatcgctgttttaacttgaacatctagtttcggaccatagaatgccgcttcaccaatcgcttcttcgtacgataagccaagctcatccgctgcctctttaagcatattttcagctttattccacatatcatcatcatcaaagtacttttctttatcttcagggtctctataacttaatctaaagctataatcctcgaaaccaaagtctttatacacatcaataatcatgtttacaacgcgtttgaattcttctttaatttgatcaggtcgaacaaagatatgtgaatcatttaaagtcataccacgaacacgttgtaatcctgatacagcaccacttgcttcatatctatgcatcgttcctagctcagcgatacggataggtaattcacgatatgaatgtggtttattcgcataaatcatcatatgatgtggacagttcattggacgtaataccatagattcagtttcatctaactgcattggtgggaacatatcttcttgatagtgatcccagtgaccagatgttttgtataaatcaacattagcaagtactggtgtataaacgtggtcatatcccatgctaacttctttatcaacaatgtaacgttcaatttcacgtctaattgttgcaccgttaggtaaccataatggcaaaccagcaccaactaattggctatttgtgaatagttctaactctttaccaattttacgatgatcacgttctttacgctcttctaacatttgtaaatgtgctttcaattcttttttatcaaagaaagcagtaccgtatatacgttgtaacattttgttgttactatctccacgccagtatgcacctgctgtagataatagtttaaactctttaattttagctgttgatggaacgtgaactccacgacataaatcagtaaaatcaccttgactatataatgttacattttcatcttcaggaatcgcgtcgattaattctaatttgtattcatcattgctgaataactctttcgcttcatctcgtgaaaccacttttcgttcgattttcatattttcgttaacgatttgtttcattgttttttcaatttgttcaaagtcatcagatgagatgttttggtcaatgtcgaagtcatagtagaatccaccttctattacaggacctacaccaaatttaacattaccatataaccttttaatcgcgtgtgccattaaatgtgcagtagaatgacgtaatacctctaacgcttcttcactacctggtgtcacaatttcaattgatccatcagtttcaagcggtttagttaaatctacaagttgcccgttaaatttgccggcaacagcttttttacgtaatccaggactaattgattgtgctatatcttcagtagtagtacctttatcaaacgcctttttattaccatctggaaattgaatattaatttgttccatgttaaaccctcctatttgctttataaatacttttatctgacctcgttaaaaaattgaacaacaatcatcgttttaacattaaacctattaacaataaacagggaatttatgacaccaacaaacatttatgtctgaaaaaaacaaaaaatcccgcccctatacaagggacgagatcgtcgtggtaccaccctagttatctaatacaatttatgtattaaatatctctgcttaagataacggtcttgatccgggtattcattacaaataccataaatgaagtagtaatcatctaatttattaaccatattctcatcaaacaatggctttctgtgtaatattgattagatcatcttgtcttcaatcatttaaacgatttagatttgtattcattatacaccaatcattttaaaattcaattgtttctgaaattttctcctgataaaaagtatggtgttgacaaagatttgacacgttcaataatacgtgctgctttagtcttctcttcaccatcacgagtcatcgctaaatgatgttccaattcactatagtcaaaattagaactaaagaatgttggtaattcatgaaccattcgataatgtagcaaaggtccaattacctcatctctcacccatggagtcacttcttcagccccaatatcatcaagcattaaaatgtttgcttctcttacgcgatgtaatttcttttcaaaagaaccatctttaaagccaccttttaatgttctaataaattccggtaaataaataattgtcgaacgtaccttcttagatttgagctgattcgcaattgcacctagaataaaagatttacctgtcccaaatggaccataaaggtaaaggcctttcacttgttccccattagttattgctgtacaaatatcatctgctgccatagctacatcaagacggtctcgatgattcatataaatatctttcaatttggcatttaaagtatctcgttgcatatgatgagatgtaattagctcagcttcaaagcgttcttcgtcgtacttgattttacatgggcattgtaaatagcgtattttaattcggttattatcaacatataactcaggcacatgcccctttacgaaatttggacaatcagcaaatttatgaccgtcataatgtttttgttgatctttatactcttgtaacacatttaagtcttcatcaatcatagcattcgttaattcagctcgatgcgcttccaaaaattgcttaacatctgggtcattgattacttctttttttatcttttctattcttttttcaaagtcctgcgacgtgttaattatacttttaaattgcttcattattgactgtcctcctcccattttttagataatttatctagaaatgcttgtcgatcttgctctaattgttgatcatctacgctattatctttagccgaatcttcttcactaggtttatctctattttctaaccatttaggtgttttttcttttgaaatacgattacgctgcccatagtatgaaccacgcttttggtaatttccgctagaaccctcatttttaggttgattaacttttttagcgtaattatatgcttctttagctgtcttaataccttttttcttccaatttgatgctatttccaaaatatacgctttaggaagtttcatatcttcttttaacatgacaaattgcaacaaaatattaatgacgccaaaagacattttttcacgttcaattaattcttcaaccattgtcttttgcgatatagttggttctgattcagaccaagaagctaacatatcaattggactcgtttgttcaagtaactcaaaccattcatcactttgtggctttggattcacttctgaagatttgcccgccgaagatgatgtagcaggagatttcacctgtaatttaggcatttgattttcgtgttccattaagtaatacgagcgtgcttgtttacgcatttcttcaaaggataactgttgtccacttgtaattgaatttaaaataacatgcttcatgccatctgctgttaaaccatataaagtcgcgagttgtgtaattaaacgctttgcatctttggtaacaatgtcttgactaataaaatgtttacctaacatttgtctcaacatttcaaagtcaaaagattcatttgataaatcgataccttggtacggttcattaatcggaatatcacttgtatcgatatctatttttgtagacggcactttaaaaacatcagtaaattgtcttgttacctgtttaaattcactcaaatcaatttgttgatactcaaagtatttcttcaactcatgaaatcgacgatgctcgacttcactatataaaaagattgacaacattggatcattaaaaaataaatgtgctgaaggcggttgaattaattggtaaacaaattgtgtttcttgttcatcatgtttgacaaacgcctttaacaatccaatcgcttcaagtaagtccatttgttgtctaaactctagtaaattaattttaagttcattcataaaaatataatgagaaagaatcaatgtttcattatgactttctttaacgaattgagtcataaaatgatataaacccactgcttgcgttccaattagcggtgtatacagtcgattcaatacctctaaatgattcgtatttaaatcaaagtgttgcataactttgaattgatcctttggtcttaagccgaattcgaaggcttgtcgtcccatttaagcatcactccgtttgttttcgcttaaaatcccttgcatcgatgctaacaattgatcaacatctttaaattctttatagactgatgcaaatctaacatatgaaacttgatcaacatgcattaacaagttcataacgtgttcacctatatctcgtgaagacacttccgtatgaccttcatctcgtaattgccattcaaccttgttagttatgtcttcaagttgttgatatctaactggtcgtttctcacaagaacgcacaagtccattaagtatcttttctcttgaaaactgctctcttgtgccatcttttttcacaactataagctgactaacttcgatatgttcaaatgtagtgaaacgtgttccacaattttcacattctcttcgtcttcgaatggcatttaattcatcggcatgccttgaatctacaactttagattgtgtagaattacatttcgggcatttcattacatcaccctctttattttgattatgcctaattatactataaatctagagatgaaaaaagaatccctcaatttaattcatttaaccaaataatgaaacaataaaaaacattatatcgttacttattaagtaatttgcatgacaatattattgtattaaaaataaaaaacctaactccgaagtcagagttaggctataaattaattgtattaacttgcacttacagtttcttttgatgtcaaaagtgctccaatttgctcagcaacatctacaactctatttgaataaccccattcattatcataccaagcaataacttttactttattccctgacatgaccattgttgattttgcatcaataatagctgaatttggattagtattaaaatcaacagacactagtggttgatgttcgacttctatgataccttctaaacctgcattttcaaaagcttggtttacttcttctgcagttacttctttttctaaatcaacaactaaatcaacgagcgatacattctttgttggtacacgtaatgccatgccgtgtaatttaccttctaattctggtaatacttcttttaaagctttcgccgcaccagtagaagtaggaataatgctttcattacatgaacgtgcacgtcttaaatctttatgtggattatcaatatttttttggtcatttgtaatagcgtgaacagtagtcattaaaccattaactattccaaactgattatttaaaacttttgcaactggaccaatgcaattagtagtacatgaagcattactaaaaatgtcaaatgcttctatatctaattggttatcatttacgcctttaactaccatttgaacatgtccaccttttgaaggaccagttaacaaaacttttttggcacctgctttaatatgtgcgatggctttatcaccatgattaaatttaccagttgcatctatagcaatatcgatatctaattctttccatggcaagttttcaggattgcgatcagcaaccaatttaattttatgatctccaacttgcaatccattttcaatcggttcaacttttagattatattttccatgtgtcgtatcgtaattgattaaatgtgcaattgtttcgggtggataactagcatttatcgctactacatttaaatttttattttgtaatgcaatacgtaataccattcttccaattctacccataccattaattgcaatattcgttgacattaaaagcaccccttgatctttatgtgttatactttatggaattagtatagcatattatatgaaatttgaaagcgttttccgttgatttatttatcttttttataaaaaatagtcattacttacatacatcaacgcgtacgtaaagtaatgacttatttatagtgtaatattaatcttcttctccgtaattcggcttttcaatataaccttcttcttctaacaatctctcaaggttttgttttaattcaagtttatcccctaaattatcgataacatgatcggccattcggctttttttatcaatagaaatttggctatagacacgtgctttcgcatcttctaatgacaaattattacgttgcattaaacgatccatttgtatactttcagaagtgtatacaacccacacttcgtctactgtattttccaattcattttcaaataataatggaatatccatgattacattatatccttgttttaaatattcttgcttttcttcttccataatatctcgcacgataggatgtatgatagcatttaattctaagcgtttttctggatgattaaacactagatcacccatataacgacgattcatctcaccattttcatcaattgcttcatcaccaaagacttctcgtacttgagctaaacctttactcccctttttaacagcttccctggctgctttatcagcatctactactttaaaaccgaatacggataagagttctgatactgttgattttcctgaggcgattccacctgttagaccaataactttcggcataatttcactctttctttatttttgacatactggacaataatgactatttcttgtcgcgatgatttttgtttcaatttgacttccacacactttgcataccggctgcttatatacattaagatgcaattgcatctcaccagtttttccatcagcatgacgataatctgaaatacttgtaccgccatatttaataccttcttctagtacttctctaacataataaaaaaccatttcttgttgttggtgtgttaagtcttttacttttttatctggtaaaacacctgcacgaaacaacgcttcacatgcgtaaatatttccacaacctgcgattactttatgatccaaaatcacttgtttgattggtttattcttattagactgttgatgaattcgatttaaataatacgtcaatgcttcatttgaaaaaggttcaggcgctatttctaaaaatgaaggataagatgctacagacgcaacatttctaatttctccaaaacgacgtatatctgaataaattaactttttgtcatttgacaactcaaaaataacatgccaatgcttacgataattaggtatcataatatcttcaagttcatctacaatgaaaaaaccgcccgccatacctaaatgactaattaatgtacgttgttctcgtttattatctagctgaaaaacgatatatttacttcttcgttctacatttgtaatggtatagccttccgataaagttttaaaagtatctaattcaattccttttataattgtttccttgccttgagctttaccttcgattactttatccgaaaatataacgtgttcaattttttgatttataacgtagggttcaattcctctttttacatgttctacttctggtaattcgggcataccattaacctcactttattttgcatcataccaggttgcaccataacttgagtctacttttaatggaacatctaattgcaatgcattttccattatctcttctacaaattcactaaatgaatctacttctgacttaggtacttcaaaaattaattcatcgtgtacttgtaataatagtttagcttgatatgttgtctctttcattttttgagcaaatttaaccattgccagtttaatgatatctgcagcactgccctgtattggcgtattcatagcagtacgttcagcaaagccgcgtaaattaaagttacgactcgtaatatcaggaatatagcgtcgacgatgtagcaatgtttccacgtaacctaaagctttggcatcttttacaatatcagacatatattgttttacacctgggaaactagctaaataatcatcaatgaatgcttttgcttttttacgagtaatacctaaactttgacttaaaccataatcacttatcccataaacaattccaaagttaactgcttttgcttgacgacgcattaaactatcgacttgatcagcttctacaccaaatactttcatagcagttgctgtatgaatatcatcgccgttgataaatgcttctttcatactctcatcttgtgtaatgtgtgctaatacacgcaattcaatttgagaataatctgctgataatataacgctatcttttgaagttggtttaaaggcttttcttattttacgcccttcttcaagtctaaccggaatattttgtaaattaggatctacacttgataaacgtccagtttgcgctaaagtttgattaaaacgtgtatggatacgttgatcatcactaattaccttttgcaatccttcaacataagtagactgtaacttagataattgacgatattctaaaatataatcaatgataggatgttcaccttgcaattgctctaagacatctacagcagtagaatatcctgttttcgtctttttaataacaggtaattgtaatgtctcaaacaatacaacacctaattgcttaggagaatttatattaaaatcttcaccagctgcatcatggatatttcgaatcaagacgtctaatttttcttgaatttctttttccatttcttctaaatcatgaacatctgtaaatataccaatttcttccatttcacttaaaatcttagctagcggtagctctaaatcagccaagagttctacctgattgtattcttctaattgtttatccatatttggtttcgcaaagtaaattgcatcagtaatagaagcaacatatggatttaaaacatcatcttcaggtaccttaaatttcttaccttttccatatatactcacatcgtctttcacaaaactttgaccgtacaatgaaacaactgattgaacatcactaatcgtacgagatggatcaattatataactggccaacataatatcgaaagaaatattttgaatatcaatccccaatctatgtgatgctacatatgtttttttagcatcatatacgacttttttcgaattcggattttctaaccatgaaactagttcgacataattatttatgtcatccgcattaattacaatatgtttctcacctgtaaataaagagaattttaaaatattatttcgcaaatagttaccaccgtctaattcgaaatggatggccgcttctttcaatgaagtaaaatcaatattatcaaaagacgtttcaatttcaaatgtcttttctattgcatcttcaacgcttgctgattgatcaatgtcagccaacaattgtttgaattctaacttcttaaacaattcgattttttcttgttgttcatcttgatgagtcattaacgtatcttcaagttttacttcaatcggactatctacattaatcgttgctaattctttactcattaatgcatcttctttgctattttgaagtttttcttttaactttttacctgaaatttcatctaaatgttcatagacaccttctactgtgtcaaattggtttagcaattttattgctgttttctctccaacacctgcaacacctggtatattatcagaagtatctcccattaatcctttcatatcaataatttgattaggtgttaacccgttgtatttttccgcaataaagtcaggtgtataatgatcaacatcagtaacaccttttttagtgtaataaatggttacattatccgttgcaagttgtgttaaatctcggtctcccgtaataataattgtctgaaagcccgctttatctgcttctttacttaaagttccgataatatcatctgcctcatagttatctaattcataacgtttaatatgataagcatctaataattggcgaatataaggaaattgctcacttagttcaggcggcgttttctggcgtccacctttatattcactatatttttcatgtctgaaagtcgttttacctgcatcaaacgctactaaaaaatgatttggcttttcttcttttaaaatcttctctagtaacattgcaaaaccatatactgcattggtatgaatgcctgctttgtttgataacaaaggtaatgcataaaaagctctaaaacttaagctattaccatcgattaatactaatttattcacaattttaacctccagaactaatttatatatattttagcatattcgactgtgatgtcgtaattaaagaaactatctcatagagtatttatacacgacctaatttcaaataaaacaagtgcctatatagacttagctaaaaaataaaaaagacataatcatgattgttcttgatgagcactccataaagtcaggttaaaagtccaacttttgagatgcacattatcatttcatgattatgtctactttttaatatttttatgctgctattttaaatttttataggtaagaataagttatgaatcgtctgaaccaaatggaatatatttaactttggtcattttcggtaattcttcataattattaaaccactcttggtaatttttattgattggtgacggatgatgcatataatgttcaaacggcaatgattccactgtataaacctcttgtcgtggatgatctttaatttgttgttttaataactgaactcttttttcatgttcataatgaacataaataaatgcactaagatatatcacagctaaaactagtgatgcacctttaataaaattaacattgattgacttatatttccgaaattcttttaataaaataattaaaatgattacatgtatcgtataaacaatcaaaaaattacctggttctattggagtaacaatgactagtgtcgacgccgaaacacatattgcaataagtaaggaatataaagtgatttgtgttttacgatcattaatagacaaataaatacctacaaatatcgaaaacgcaaagtaaccacatacaattacgttcacaaaaccaaccaatccaatatctgtatttttatttaataaaaactgattgtaaaatagtaaataataaagcggtaaagtgataaatcctatcataatgatacgacgctttaatattgttaaatgtacataccgatcacttctaagcagtagataaataataagcgctgcaatcatacttaaaattataatctgactgaaaatgacaccatatggaagtgacgttgatatcatttctgcaaattttgaaaagataccttgattatttgaaacttgttgatattctgatccttcaaataaaattttgcgataatttggattggaaaacataatgattgtacctatagtagcaatcataaatgaaaacaataatttataattaagtgttcgatttgcagtaaattcatacagaaaagctaaaattaaaatgatacagtggaataatgtcacattctccataaataattgaccgaagaagcataaaacatagaatagtacagtaacacttaccggctgcttttctttatatataattgcattaatacaataataaataataaagagtgaaattagtgttgatgtcgcataattataaaatcctgcaaaccagccatatgtatctgcataaatagcacttggtaaaattaacattaaagaaaatgctaacaaataatagcttgtccacgctttacaacgtgtaatgtgcataatcatccaaatgatgcccatactaatgaggccatatgaaagccaacgtaaccagcttacatgtacagctataatttcaaagatatttccgatatagcgaccattaagtgatgcaaatcctacttttaaaatatcagtattataattgctaaaccattgtaaatcatcgtgcatgagtggtagtaagatacccataaaagtataaaacaataatatcgcaattaatatcaaagttgtcttgtgtaattgaattgttttcactttgctaatcctcaaatctagttaaattttcctcaacttgtaggtcgaaaaattaattcaatatttttaatgtatttctaattttcacctatgcatgtttcctcaatcaaattagataaacaaggtatttaatattactttcaacaatttatctaaatcgcccctcgtctttttctatgacgaatgattacacttgtctattcaagtgtttaaattaagatttatttccgttcaaataaaacttattactttttaattaagcatctatttcaagcgcgttactaaaatttctttattataataaatatattataaaattgcttgattcacagcaatctattacttataacttacaaatcgacatatacaaatgacaaaattgacaaccgaatttattccacttcattaactctaatttaataccaatagagatttgaacgaaataaaaaagcagcaacaacttcgtgaaaaatacacgcgctgttaccactttaatttttattctttataatcttttagaataactttgaacgttgagcctttgccaacttgactattcacttcaatattgccttggtgggcctctactatatgctttgtaattgataatccaagacctgtcccaccagaatctctacttcgtgctttatctactctataaaatctttcaaaaatacgttgttggtcttctaatttaatacctataccaaaatcttgtacttcgaaaatgacacgaaagtcatctcgatacacacgaacgttaatatctccatcttcataagaatagttaattgcattcgttaacaaattcgtgataacttgagcaattttactttcttgtgctttaacaatgacatctttttcaatatcagtatgaatggaaatatttttttgattggcttgagtcatcatattatcaataatacgccgcgttaaatctgataaattcatatagtctgtatctaactctgtatgttgctcaatatgcgataaatctaacagatctgttactaaagattctattcgatttgattcttttaaaattatgtttaaaaacatgtctaatgattccgcatcattttttgcaccatcaataagcgtttcagcaaaccccttaattgaagtaataggtgtttttaattcatgtgaaacatttgctacaaattcacgtcttagattttcaagttgtttcagatttgttatatcatgcatcacaactaaaatcccttgcaaacttttttgagacctagttaaaatcggaacgcatgaaatatcaaagtacttggcatggacttggtttattgcaacttccaattgttcataaataggtttttcaactttaaaactttctaaaattaattgctcaatttcagtattaacatagccgtgatagcctacttgttcaatattatgcgagatgttgaactgttcataatacgctttatttgcaacaacgatttttccatttcgatctatcattaaaatagcacttggaatattttcaatcgttgtttttaaacggttggattgaattttttgctcattattaagcttttgaaggcgtcgtgctaaatcattggtagacacaaaaagcgctttagtttctacaacattactttcaggtacacgtatgtgataataaccatttgccaacaattgtgttgcataagtaacttcttgaatgggacggattaatgtacgcttaaaactacggcttgcaaaatacagacaaatgagtacaactaaacatgtcaaaataagatatttccacaacgtccaatgcatttctgtaatatcgttattgtaacctttaatccatacatgataaccgttaaccttcttattaaaaataaaaacgtcccttttttgaatatagctatcactatttgggatagctttcagtttgccactactaaacacctttttatcatgcttagttatcaataaatctatattttgctgttttacaatttttttaactttatcaatctcattatcttggactaaataaatatatgatcttgcatctgttgctagagcttgttcgtgtttttctgataaaacatatgtgatggaagcgtgaataataatgcctaatgtaacaaaactgataattaatatactgcttatcaataacattaagcggtggtgaaacttcatcattgttctttaggtctttccaatttatagcctaagccacgcacagttttaataagttgtggcttcttaggattatcttctaatttatctcttaaatgactgatatgtacatcaacaattcttgagtctcctgcaaattcataattccataccgtatttaacatatgctctctcgtaatgactctgccttgtctttctatcaaataaagcaagagttcaaattctttcggtgttagctccaataactcattatgcttatatacttcaaaataatcgggtctaatacgtatcgatccgatggtaatatcatcgtcaatctcttctacttcttttacaaattgagaacgtcttaaaatggctttcacacgggcaacaacttctctaggtgaaaaaggcttagtcatatagtcatcggcacctaattctaaacctaatacccgatcaaattcatcatttttcgccgttaacattaatatagggactaaatttttatttgttcttacagtcttacatacgtcaatgccatcttttttaggtagcataacatctaaaataattaaatctggctgttcactttctaccttttctaaagcctcatcaccatcaaatgcgacaacaacttcataaccagctgtttctaagttatatttaagtaatgttacgattgaatgttcgtcatctactaccaacactttttgcgacatggtatgcctccctaacttataattatatttacattataaccgaactatttataaaaataacatcctacacattatctttacacattttttacattactttacatataaataaaatacttcttatatttccttctatcatttgcatgacttactctgggacaacgaaataaattttgtaaaaatagcatttctatcccactacctatgcatgagttttactcatttattcctaagcttatgtacatattcgctttgtctaatgtgtaagaaacactacataatcaatcattggtgactctttattatttctatcctgttgccaacttcaattcatttaaaaaggcgaacctagcaattaaagttgctagactcacctaattttattttgcttattttaaatttttaatcaattcatctgcaaatgctgatgtagaaacttcttcagcaccatccattaaacgggcaaagtcataagtaacaacttttgaagcaattgtatcttcaattgaatctgtaatcttatctgccgcttcttgccatcctaaatgttctaacattaatacagaacttaaaattactgaagatggattcactttatttaaacctgcatattttggagctgtaccatgtgttgcttcaaaaatagcatgacctgtttcataattaatgtttgcacctggcgcaataccaataccaccaacttgtgcagctaaagcatctgaaatatagtcaccattcaagttcatagttgctacaacatcatgctcagctggacgagttaaaatttgttgtaagaaaatgtcagcaatagaatctttaatgataatcttgccttctttttcagctttttcttgagcagcattagcagcatctctgccttcattttcaacaatttcgtcatattgttgccaagtgaatacttgatcaccaaattcagataatgctaaatcgtaaccccactgcttaaatgagccttctgtaaatttcataatattacctttatgaactaaagtaactgatttacggttattatcgatagcatattgtatagctgctctaactaatcgctcagttccttctttagaaactggtttaataccaatacctgaagtttctgggaatcgaatgtttgtcgcacccatttcgttttgtaagaagtcaattacctttttaacttctgttgtaccttctttaaattcaataccagcataaatgtcttcagtattttcacggaaaataaccatatcaacatcttgtggacgtttaacaggtgatggtactcctttaaaccaacgtaccggtcttaagcaagtaaataaatctaattcttggcgtaaagccacatttaatgatctaataccaccaccaattggtgttgttaaaggtcctttaacagcaattaaatattctttaattgtatcaagtgtttcttgaggtaaccattcaccagttgtatcaaatgctttttggccagctagcacttctttccattcaatgcgtttttcgccattataggctttctcaacagcagcatctataactcggcttgctgccttccaaatatccggtccaattccatcaccgataataaatgggataattggttcattaggtacgtttaatccttcagttccttgagtaattttttctgcagtcatagttattttacctccaaattttacatcttcatttttaatttgtattgattattttctttcttcaagcgggatatacttacgattcgtttcgccaatatatttcgctctaggacgcataattctattatctttatattgttctaaaatatgagcaatccatcctgcagaacgacttacagcaaagattggcgtgaataagtcatgaggtatttccatacagtgataaacactcgcactataaaaatcaacattaggaattaatcctttttcttctgccatacgtttttccattttcactgacatttcaaataattcttcacgaccagcgtctttcgtaatttgacggctcatttctcttaaatatttcgctctaggatcaccatctttatatacacgatgaccgaagcccattactttatctttattagcaaatttttcatctaagtaagcatcaacattttcaattgacccaatctcagataacatcgtcataacttgttcgtttgcaccaccatgtaatggccctttcagagaacctacggctgctacaatacctgagtacatatctgacaatgatgataccgcacaacgtgccgtaaatgcagatgcgttcaactcatgatcagcgtgtaaaataagtgctttattgaaggcttctacttctatatctgttggtaattccccacgtaacatatataggaagtttgccgcataacttaagtcaggattaggcttaagtggttctttatcttgtcttactcgagcaaacgctgtaactaatgatgctactttagcctgtatacgcattgctctttcataacgattttcatctgattcattttcagcatcaggatcgaaatgtgcaatatatgataatgacgtacgtaatgctgtcattggatgcacgtgatctgtaacatactcctcaaaatgtgtatacacacgaggatttaatgtcatgtattgatttaatttcccttttagatgagcaagctcttcttcgtttggcaatctatagttccataataggaaaataacttcttcaaattgcgcattttcagctagatcatcaatatcatagccggcataagtcaattgactttcaataattgaacttattttagtctccgctgcgataaccccttctaaacctctttgtaattctgccatgataaatttcccctttactgtttctttatgaaatggctttcaactaatattatagctaaacgcatttcgtttgtgaaatataaaaactggcattatatgtgcaacaatttttttgtaaatctatgtaaatgtcacagaatagccacaaatagcaccattaaagctttttcaagatgtgaataatccatgaattttacaatagaattaaattttcaattggttattatatatgattataaaaaccaaagtatattaacatggaattttacacatttttaccgaaaataattgtatatatctcaatataagtgcataataaacatatctatatttaagggagatgtattatggctgaaaaattacaaagggaactgagcaatcgccacatacaattaattgcaattggcggtgcaattggtacaggcttattcttaggtgctggtcaaacgattgcattaaccggcccttcaattctattaacatacatcattataggatttatgttatttatgtttatgcgaggtttaggagaaatcattatacagaatactgaatttaaatctttcgcagatgtaaccaatacatatattgggccttttgcaggatttgttaccggatggacatactggttctgttggattattacaggtatggctgaagtaacggctgtggcaaaatatgttagcttttggttcccagaaattccaaactggataagtgcactattttgtgtactgttattaatgtcattcaacctacttagcgcaagacttttcggagaattagaattttggttctctatcattaaaatagcgacaattattggtttaatagtagttggtttcgtcatgattctatttgcatttaaaactcaattcgggcatgccagtttcacaaatctatatgaacacggcatattcgctaaaggtgcttctggattctttatgtctttccaaatggcactattctcatttgtaggaattgaaatgattggtgttacagctggggaaacaaaagatccagttaaaacaattccaaaagcaattaacagtgtacccattagaattttaatattttacgttggggcgttagcggttatcatgtctattatcccttggcagcaagttgatcctgataacagtccattcgtaaaattattcgcattgatcggaattccgtttgctgcgggcttgattaattttgtagtattaaccgctgctgcttcatcatgtaacagtggtatattctcaaatagccgtatgcttttcggtttatcaagtcaacaacaagcacctccgaacttttctaagacgaataaatatggcgttccacatgttgcaatctttgcttcatcagcattattacttgtggcagcattactaaactatattttcccagatgcgacaaaagtatttacgtatgtgactaccatctctacagtgttatttttagttgtatggggtctgattatcattgcatatatcaattatagtcgtaaaaacccagatctacataaaaatgctacgtacaaactattaggtggcaaatatatgggctacttaatatttgtattcttcatttttgtgttcgggttattatttattaatgttgatacaagacgtgcaatttattttattccgatttggtttatacttttagcatttatgtacttaagatataaacgtatcgctgctaaatcaaataaataacaacaagttttagggcttgggacattaagttcttaggcaatgtaaaaaagctgatttctattaattatttgatagaaatcagcttttttgatatgtattttataatgtacagctcgttgagctgctattttccttatattaagtgccatcaatacaaaacctagctctcgtttaactttatttattcctcgaactgacattcgagtgaaacccaaaatagccttcataaatccaaaagcaggctctacatcaatttttctttgactatagatgtttttcgtttctggttcagaaagcttttgattaatttggactttaaagtattcccaattataattcttcatgattttcttattggatttcgaatttggtttcatgcattgatgtctcaaagaacatgatgaacagtcatcacattcatatagtttgaagtctcgtttaaaaccatatctatcattacggtatgcatatcttttaaaacctattcttttgttattaggacatataaattcattattaagttcgtcatatttccaattttgagtgttgaaaatgccacttttaaactttctagttttatctttaataaacatgccatacgtaataagtggcgttttattaaaatcatctataatagccatatagttttgctcactaccataacctgcatcagctacaatatactctggtaaataaccgaaggtattttgaatcattgttaaaaatgggattaatgttctagtatctgttgggttttgaaataggtcataggataaaacaaattgagaatttgtcgctatttgtaaattgtatcctggcttaagttggccatttttcatatggtcttccttcattctcataaaagttgcatcatgatcagatcagttttagaaaaactatttctatctttaagaatcgatttttgttcttcatatttattttttctttcggaataatcatcaaatttctttttgaacttcttaatctcagttatttttttacgggtctgttttctaatttgagcacaatcttcgttctcaatagaatgatttaaatcttcgatttctttatctaaatgactaccaattaaatctatttcttctattgttaaatcgctatctccatcttcttttatctctggtattattttttcttcaactaagtcacgatataatgtttttgaattttcgttcaatttcgattcgtgattttgaatacttttcttccacacaaatgtatatctattggcattagcttctacttttgtaccatcaataaaaattgaattattatcaataagattttgctttaaacattgactatggaactgaataaataaagattcaattaacgcatcagtattaggattcactctaaaacgattaatagttttataagaaggtgtttgatcttgagctaaccacatcattcgaatactgtcatgaagtaatttttctattctacgaccagaaaatacagattgagtatatgcatataagatgatttttaacatcatttttggatgataggatgttgcgccacgatgatgtctgaattcatcgaattcgctatcaggtatcgtttcaacaatttcattaacatatcgcgaaatatcattttgaggaattctaacagaggtttctattggtagtgtaagttgggtcatgttataaattttatacataaggcacctcgttaatttagtttagtggtatttattaaattatacgaagggacccaacacagaaaattcattttattgaattttacatttatgtgcaagttgggcaaagtgttttatttttttaaagtatgtaaaagtaaaattacatgttaatacgtagtattaatggcgagactcctgagggagcagtgccagtcgaagaccgaggctgagacggcaccctaggaaagcgaagccattcaatacgaagtattgtataaatagagaacagcagtaagatattttctaattgaaaattatcttactgctgtttttttagggatttatgtcccatcctgttttatatgcaacttataatattaaattgcgtacttggctcaaaacttttactttctcatctatttaataatgtatcatttcagaaatacatccatacttctattttataataaatttccaaagtaatatgagtgaaagtttgaaggtgataatgtacatgtataaaagatataaacatttatatagattgccattcatacactatcattatcaaataacctattaattacgtcataaaataccagatgaaccaaaaaacgcctttccattgttgataaatggaaagacgtttttttataaattatagtacgtttgcatatccttcaaagattttaccttgagcagcatcaatcgtaactaacatgttattgcttatgtttttaacagctttttctacacctacaactgttggaatacctttttctaaaccaacaattgcacttggtgatgtaataccattttcttctgtaattaagcctaaagctttttctacataaggtacaaacgtttcatcgattgagttagtaacgataactttgtcagataaatctttaccttctaaatctttaacagtttcagcaactaacgtagtaccaacaactgatccacgtccaataccttgaccattagcaatttcgtcaccaactaggtggattttcatcatattagtagttccagtttcaccagttggtacaccagcagtaataatgattaaatcaccattagatactctaccagtttcaacagctgttgcaactgcattgtttaacaatgcatctgtactcttacgtccttttttaactacaggttgaactccccaaacaattgaacattgacgtgcagtttcttcacttggagtcaccgcaataatgtctgaatgtggacgatatttggagatagtacgtgccgttgaaccactttcagtagcagctacaattgctttaacatttaagtttaaagctgtatgtgcaaccgaaataccgatagcattcactaatgaagtttcaactaatttagtacgatctgacaataactttttgtaatcttgggctgcttcagctgatacagcaatatttctcattgttttaacagcttcttcaggatataaaccagcagcagtttcaccagataacattactgcatctgtaccatcatagattgcgttggcaacgtcactagcttctgcacgtgtagcacgtgggttacgttgcatagaatctaacatttgtgtagctgtaataactggtttacctaatttgttacattgtctgattaaatctttttgaaccattggtactttttcaggtggaatttcaacacccatgtcaccacgtgcaaccattaaaccatcagacacttcaagaatttccgcaatattatcaataccttcttggttttcaattttagggaatactgaaatgttagctttttgttcttctaaaatttcacgaatttctaaaacatcactaggacgacgtacgaaacttgctgcaatgaagtcaacattttctttaataccgaaacggatatcttcagcatctttttctgtaataccaggtaaacttactcttacgccaggtaagttaacaccttttttgtttttaagctcaccagagtttaaaatatcacatttaacttcttttttagcatggtcaatatctttaacttgtaattcaattaagccatcatcaagtaaaatgtatgaacctacttgaacatcgttaattaagttttcatatgttactgagaacttttcaggtgttccttcaacttcattcatgctaacaataacttcgttgccacgttcaagttcaatgataccgtctttcatattatgcgtacgaatttctggaccttttgtatctaataaaattgctacaattttgtctaatcttttagctactttacgaattgtatcaattctacctttatgctcttcatgactaccatgtgaaaagtttaatcgtgcaacgttcataccagcattgattaatttctcaatcatttcttctgattctgaagctggtccaattgtacatacaattttagtttttctcattttataattcctcctgaaatcttatatagataacttgttagcaagttcatatagactataatcaaatttatgatctttaccatcaaaaatttcatcaaaagatgttgctacaattttattgttcttaattccaacacccttagctgtttcaccttgcattaataagtctaccgcatatccacctaaacgtgatgctaaaactctatccgcacctgttgggctaccaccacgttgaacgtgacctaacacagacactctattatcaacattgatgtattgtgataattctttttgacaatcttgcgcagtcatacaaccttctgctacaagaacgattgagtgtttcttaccacgtttaataccttgttcaattttatcagctatttctttaatatctgttttcacttctggaactacaattgtctcagcaccaactgataatccagcccataatgctagatctccacaatcacggcccattgcttcaatgataaatgttcgtgcgtgacttgacgcagtatctctaattttgtcgactaagccaataatcgtatttaatgctgtgtcaaatccaattgtaaaatcagtaccattgatatcattgtcaatcgtaccaggaataccgatagtttgaatttctttacattcctcactgatgcgttgtgcaccgcgataactaccgtcaccaccaataactacaaggccctcaatccctcttttacgtaagttttcgattgcaactttacgtacttcttgctccttaaactctggacatcttgctgaatacaagaatgtacctccacgctgaatcgtatccccaactgatcctaattcaagtttatgaatatcatcatttaacaatccttggtaaccatgatacacaccataaacttcaatttcattgtaaattgctgtacgaacaactgctcttacggcagcattcattccaggtgaatctccaccactagttaaaactgcaattttcttcatgacgacatacctttctataactgatttatctttaactctaaattaccacaaattgatatgtcattccatcaaaactaatgtattgaattgatgtaaacgttttaaatattgaattttattttaacttaattaaaaaaagattagtagccacaattttgactactaatcttagttaaaattcagtatctaaatattaaattattgttttaatgtacttcaatttatggtaaaacccagtatcgatttaacataaaaatgctcaagttgattattctatataagaaccgatatttctgaatttttcaaagcgatcattagcaatttcatcacgtgataatgactcaagtgaatctaactgtgcaacaaacgctgatttaatagctaaagcttgctgttcaatatctttatgtgcaccgccaagtggttcagaaatgacatcatctataatacctaattgcttaatatcatgggcagtaattttcattgtttcagctgcaattttagccaaattactgtctttccataataatgccgctgcaccttcaggagatataacagagtaagtactattctctaacatcaatactttattggcaataccaatacctagagcacctccactgccaccttcaccaatgacaatcgcaataactggtacttttaatgaagccatctcaatcaaatttgttgcgatagattcactttgtccacgttcttcagcagctttaccaggatatgcaccttttgtatctataaatgtaaagataggacgattgaatttttcagcttgtttcattaaacgtaatgcttttcgataaccttctggatgcgccataccaaaatttcgataaatattatcttttgtatcttttccacgttgttgtccaataactgtaacagcacgaccatttaaaaagccaataccaccaatcattgctggatcatctctaaaattacgatcaccatgtagttccataaacgaatcaaagatatatggaatataatctagggtcgtaggtctttcttgcaaacgcgcaatttgcacacgatcccatggttttagatttgtatatatttttttagtttctcgttccaatgacgcttcaagcatgtcaatttcttcttgtaaatccacatcatttttatcttgagattcttttaaagattcaattttatttcgaatttcaaaaagtggtttttcaaaatctaacattatttagtcacctcttgatggatttttagaatttcagacaatgtttgacgcatatcattacgatgtacaactttatccaattgtccatgctctaataaaaattctgcagtttggaaatcatctggcaatttttcgtttattgtctgttcaataactcgacgacctgcaaaacctatcaacgcttttggctcacttaaatttatatcaccaactgatgcaaaacttgcagatacaccaccagtagttggatgtgttaaatatgatatatataatagtccagcgtcagaatgacgttttaaagatacactggttttacccatttgcatcaaggaaataataccttcttgcatacgtgcaccaccacttgcagagaaaagaataaatggtaaacggttctcagtgcagtaatcaatgatgcgacatatcttttcaccgataaccgatcccatacttcccattctaaaacgtgaatccatgacagcaacgccaaatttcataccatctagttgtgctgtaccagtcacaactgcttctttaagacctgtcttttgttggtccttttcaattttttctaaataacttggaaaatctaatggattcgcagaggtcattcccttatcgaattctgtaaatgatccttcatcagaaattgcttctatacgtttatacgcagttaaagcaatatgatgatcacaattaaagcacacatttaaattttcagctaattcttttgtgtacataattttcttacactttggacacttagtcataatacctgcaggcacatcattatttttagagtcttgtactgtaagatatttctttttctttgttcgattaaaaaaatctttaaacataggaaaacctccaaataacctctgttctaaccatttagagccttaaactgaacttgaccagttaaaaacgggtttaaatttatttgatttatattcgtttgactgttgaatgtttatcataaactttcattttcatcattttaatgactctttattgctaacttttaagcaatttaattaaacgttaattatttttattgtaaatctgtaagtttcattgttttatcatacacatcttgcggatcaacttcaatcctagctactccagattccattgccgctttagcaacattacgagcaactgatggcgctacacgtttatcaaacggtcctgggatacagtagtcttcatttaattcagaactatcgattaaatcagcaatcgcttctacagctgcctttttcatttcttcatttatatgtgtagcttcaacctctaatgcacctctaaaaataccagggaaagctaatacattattaatttggttaggatagtctgaacgtcctgtaccaacaactcgtgcacctgccgctttggcatcatcaggtattatttcaggatttggattagccattgcaaatataattggattatctgccatactcttaaccatatcttgtgacagcgcattagctacagaaaccccgataaatacatctgcatcttttacgacttcttctaaagacccttcaatcttatctttatttgtccattttgctacaacatctttcgtaggattcataccatatgaacgtccttcaaaaattgcgcctcttgagtcacacataaccatatttcttacaccatacgcgtatagtaatttaacaatggctattcctgctgcaccagcaccatttagtacaacttttattttagcaatatctttgttaacaactctcaatgcatttaccaaacctgccaatgttacaattgctgtaccatgttgatcgtcatggaataccggaatattagtttcttttttcaatcgttcttcaatttcaaaacaacgtggtgccgaaatatcctctaaattaataccaccataattaggttctaacaacttaactgttttaatgatttcttcggtatcagttgtatttaacgcaataggcaccccattgataccagcgaagcttttgaataatactgctttaccttccattacaggaatacttgcttcaggtccaatgttacctaaacctaataccgctgttccatcagtaataactgcaactgtatttcctttaattgtgtaatcatatacttttcttttatcttcataaatatctttacacggttcagcaacgccaggtgagtatgctaaacttaattcctctttattagtaacttttacatttggtttaacttctaatttaccttgattacgtttgtgcatttccaatgcttcatctcttaatgacatgaaatcagcccctaattcaatatttatttttaaaaaataacttggataaaacgcattacattataaaagtaaaaatattgggtaaatctgaatgagtaagaatttatggttttgattatgtaacacaaatagcgataaacgataataaaataatatttataaagatacattaaaccatactatctaaagatatacctttaattattataatggatagcaaaaaccaatatatcaaaaagttattatttttccgcacgatatatcgacaaaattctttactcaatttatgtatactgctttttgtgctaattattcttatggattaatcaataatgtaaagtgaaactcataaaaataataagcataaaaaactaatataaacgcaaactgatggttaaaaaatatctaaccatcagtttactatatcataatttattagttgataaaagttatataagcctaatatcactagggttaaaggattgtataaaattattaaacatactatctttttgattaatatagcctaaagtagtcatttgtttaatcgtttcatcataaaaggataacacaacatcattagcattctctttcgtagctttaatcatctcttcaaacatatctatttgtgatttatttctaattataatttgtttggcaaatgctaatttttgttcttcaaaagtggctaatgtctgaatctcatttataattagttgacgttgttgctttctatggtcaaatttcccgctaactataaacaagtcattatgtgataacaactcttcgtactttttaaactgattagggaaaatcacaccatctaaagtttcaatgccatcatttaatgtgacgaatgccatattttgaccatttttagttcgaatttgtttaactttatcaaactgtactaatataggtttataattctgcgcgttactcaatttaaatatcgttaaatattgtttggcaacaaactttttatctactgggtgttgcgaaacataaaatcctaaatattctttttcgtactgactaataagtgcatcaggcaattcttctttatcttcatacatctgttttggcgttaaaatatcaaataaaaaaccatcttgttcaatgtttaaatcgccatccaacacttgatcaatagcttgcaacaacgttgaacgtgttttaccaaaagcatcaaacgctcccactaaaatcagtgcttcaagtaactttctcgttttgactctcttcggtatacgtctagcaaaatcaaagaaatctttaaatttgccgttctgataacgttcatcaacaatcactttcacactttgataaccaacacctttaattgtaccaattgataaataaatgccttcttgggaaggtttataaaaccaatgactttcgttaatgttcggtggcaatatagtgataccttgtttttttgcttcttctatcatttgagcagttttcttctcacttccaataacattacttaaaatatttgcgtaaaaataatttggataatggacttttaaaaagctcataatgtatgcaattttagaatagctgacagcatgtgctctaggaaaaccataatcagcaaatttcagaatcaaatcaaatatttgcttactaatgtcttcgtgataaccattttgctttgcaccttctataaaatgttgacgctcactttcaagaacagctctattttttttactcattgctcttcttaaaatatccgcttcaccataactgaagtttgcaaatgtgctcgctatttgcataatttgctcttgataaataataacaccgtaagtattttttaatataggttctaaatgcggatgtaaatattgaactttgcttggatcatgtcttcttgtaatgtaagttggaatttcttccattggacctggtctatacaaagaagttacagcaacaatatcttcaaagtgttccggctttaatttttttaatacacttcttacaccgtcagactctaattggaatatgccagtcgtatctccttgcgacaacaattcaaacactttttgatcatcaaacggaatcttttcgatatcaatattaatacctaaatcttttttgacttgtgttaagatttgatgaataatcgataagtttctcaaccctagaaaatctatttttaataacccaatacgttcggcttcagtcattgtccattgcgttaataatcctgtatcccctttcgttaaaggggcatattcatataatggatggtcattaataataattcctgccgcatgtgtagatgtatgtcttggtaaaccttctaactttttacaaatactgaaccagcgttcatgtcgatggtttcgatgtacaaactttttaaaatcgtcaatttgatatgcttcatcaagtgtaattcctaatttatgtgggattaaacttgaaatttcatttaatgtaacttcatcaaaccccataattcttccaacatctctagcaactgctcttgcaagcagatgaccgaaagtcacaattccagatacatgtagctcgccatatttttcttggacgtactgaatgaccctttctcggcgtgtatcttcaaagtcaatatcaatatcaggcattgttacacgttctgggtttaaaaaacgttcaaataatagattgaatttaataggatcaatcgttgtaattcccaataaataactgaccagtgagccagctgaagaaccacgaccaggacctaccatcacatcattcgttttcgcataatggattaaatcacttactattaagaaataatcttcaaaacccatattagtaataactttatactcatatttcaatcgctctaaatagacgtcataattaagttctaattttttcaattgtgtaactaagacacgccacaaatattttttagctgattcatcattaggtgtctcatattgaggaagtagagattgatgatattttaattctgcatcacacttttgagctataacatcaacctgcgttaaatattcttggttaatatctaattgattaatttccttttcagttaaaaaatgtgcaccaaaatcttcttgatcatgaattaagtctaattttgtattgtctctaatagctgctaatgcagaaatcgtatcggcatcttgacgtgtttggtaacaaacattttgaatccaaacatgttttctaccttgaatcgaaatactaaggtggtccatatatgtgtcattatgggtttcaaacacttgtacaatatcacgatgttgatcaccgacttttttaaaaatgataatcatattgttagaaaatcgttttaataattcaaacgacacatgttctaatgcattcatttttatttccgatgatagttgatacaaatcttttaatccatcattatttttagctagaacaactgtttcgactgtatttaatccatttgtcacatatattgtcataccaaaaatcggtttaatgttatttgctatacatgcatcataaaatttaggaaaaccatacaatacattggtgtcagttatggcaagtgcatcaacattttcagacacagcaagtcttacggcatcttctatttttaagcttgaatttaacaaatcataagccgtatgaatatttaaatatgccaccatgattgaatggcccctttctattagttaagttttgtgcgtaaagctgtagcaagttgctcaaattcatcccagctgtccactgaaactcctgacgcattcggatgaccaccgccaccaaaatcttgcgcaatatcattaataatcaattgccctttagaacgtaatcgacatctgatttcattaccttcatcgactgcaaatacccatattttcaagcctttgatgtcagcaattgtattaacaaactgagatgcttcatttggctgaataccgaattgctccaatacatcttcagttattttaacttggcagaatccatcatccataagttcgaaatgttgtaaaacataaccttgaaacggcaacatttttgggtccttctccatcattttatttaaaagcgcattatgatcaatatcatgcccaattaactttccagcaatttccatagtatgttctgaggtattgttaaaaaggaatcgcccagtatcaccgacgataccaagatataaaacgctcgcgatatctttattaacaattgcttcatcattaaaatgtgagattaaatcgtaaatgatttcacttgtagatgacgcgttcgtattaactaaattaatatcaccatactgatcaactgcaggatgatgatctattttaataagtttacgacctgtactataacgttcatcgtcaattcgtggagcattggcagtatcacatacaattacaagcgcatcttgatatgttttatcatcaatgttatctaactctccaataaaacttaatgatgattccgcttcacccactgcaaatacttgcttttgcggaaatttctgctgaatatagtattttaaaccaagttgtgaaccatatgcatcaggatctggtctaacatgtctgtgtataataattgtatcgttgtcttcgatacatttcataatttcattcaaagtactaatcattttcatactcccttttttagaaaagttgcttaatttaagcattagtctatatcaaaatatctaaattataaaaattgttactaccatattaaactatttgcccgttttaattatttagatatatatattttcatactatttagttcaggggccccaacacagagaaattggacccctaatttctacaaacaatgcaagttggggtggggccccaacgtttgtgcgaaatctatcttatgcctattttctctgctaagttcctatacttcgtcaaacatttggcatatcacgagagcgctcgctactttgtcgttttgactatgcatgttcacttctattttggcgaagtttcttccgacgtctagtatgccaaagcgcactgttatatgtgattcaataggtactgttttaatatacacgatatttaagttctctatcatgacattaccttttttaaatttacgcatttcatattgtattgtttcttctataatacttacaaatgccgctttacttactgttccgtaatgattgattaaaagtggtgaaacttctactgtaattccatcttgattcattgttatatatttggcgatttgatcgttaattgtttcacccatctgaggctgtcttcctaaaagttgcatagactttaaaacatcttgtctattaatcacacccactgtctttttattactcgaaacgacaggaatcaattcaataccttcccaaatcatcatatgcgcacaacttgctactgtactcatagcatttacataaataggatttcgcgtcatcactttatctatttcgtcgtcgtcctttgtattaatcatctctcgacttgttacaatacctactaatttatacgactcattgactaccggaaatcttgtatggccagttcgattcgccatacgcttataatctgctattttcatcgtatcaaacagcacagataaatcatctaatggcgtcattatatcttgaactattaagatatcttttcgtattttctgattaaaaagtgctttgttgataatatttgcaactaggaatgtatcataacttgatgatagaacaggtaaatcatgttcattcgcaaaattaataactttattagatggcttaaatccaccagtaattaatatagccgtacctctttttaaagcttcaatctgcacatcttcacgatttccgacaatcaataatgtctttggaccaatatactttaaaatatctttgagttccattgctccaattgcaaatttagataccatcttagtgatacctttgttgccacctaacacttggccatcaataatattgacaatttcattaaaagttaaatgttcaatttcattacgattacgtttttcgattcgaaccgtaccaacacgatctatcgttgcgaccatgcccattttatcagcatctttaattgcacgatatgctgtcccttcagatacgtttaaaaatttagcgattttacgcaccgaaattttagagcctatagataacgattcaatataatctaaaatttgttcatgttttgtcattctttacctcttcttttcgaacagtattaactacattataactttattttggataaaaagcattgaagtgaaatgaaataatgatcgtttcacctattttattttttgaaaatatacaacaaacacaaagatcacaaaatctttaattttaaatggaaaaatccattattatttattagaatgtaagtgaggagggatgtactaatgtataaaaatatattacttggtgtagacactcagttaaaaaatgaaaaagcactaaaagaagtgtctaaattagctggcgaaggtacagtcgtaacagttttaaacgcaatcagcgaacaagatgctcaagcatcaattaaagcaggtgttcatttaaacaaacttactgaagaacgaagcaagcgattggaaaaaacacgcaaagctttagaagattatggtattgattatgaccaaataattgttcgtggtaatgcaaaagaagaactattaaaacatgctaatagcggtaaatacgaaattgttgttttaagtaaccgtaaagcagaagacaaaaagaaatttgtacttggaagtgtcagccacaaagtagcaaaacgtgcgactatccctgtattaatcgttaaataaaatttttatccagaatcacaaataatctttcaatcatgatgcagtctcaaacgactgagtaaatacaagaaacgattatgactgtggttctggattttttatatcgtagtaaatttataatcaatgtctaattgtataaaactaaaattacgagagtaggtcagaaatgataaagaaccactgatgtcccccgtccacgtcgtaactgaatcagtagaatataaaaacacccactaaaaatatgcagacgataacttccacatagattagcgaggtgttttttagtgtaaaatctatattctatttaaaactgaacagattcacctggttttaaaatttgcacgtcccctacattaacagcatctttaaattgttgtggatcttgttcgattaatgggaatgtatcataatgaatcggtacagaaatttttggtttaataaattcattaatagcataacttgcatcatcaatacccatcgtaaaattatctccaattggtacaaaacatacatcaactggatgacgtttcgcaataagtgacatgtcactaaacagacctgtatcaccagtatgataaattgtttttccttcaacttcaaacacgatacccattggcatacctaaataaactggaataccattttcatgtgtaaaacttgaactatgaaatgcttgaacaaatttaacgcttccgaaatcaaagtttgctttaccaccaatattcataccatgaacattttcaacaccgtgatatgaagaaagatagtcagccatttctgcacttccaattactgttgctcctgttttctttgctagttccacaacatcaccaaaatgatcaaaatgaccgtgcgttaaaacgatatagtctacctgcactgtttcaatattcaaatcacacttagggttatttgaaataaacggatctacgataacctttttgttgttcccttctaaataaatcgttgattgaccatgaaatgataacttcatttgagcatcctcctatcaattactatataaatttagtacccttttgccacttaattataacaaattctcaaattttaaaaattgaaaatctagttaatgtattagctcgattttgaaatctaataataattggcataaaatggaagtaatattatgttgaggagtgtttataaaatgacaaaaatatcaaaaataatagacgaattgaacaatcaacaagctgatgcagcatggattacaacaccgttgaatgtatattattttactggataccgtagcgaaccccatgaaagattatttgcattattgattaagaaagatggtaaacaagtactattttgtccaaaaatggaagtcgaagaagtcaaagcatcacctttcacaggtgaaatcgttggatatttagacactgaaaaccctttttcactttatcctcaaacaatcaataaattactaattgaaagcgagcacttaacagtagcacgccaaaaacaattaatctctggtttcaatgtcaattcattcggagatgttgatttaacaatcaaacaattgagaaatattaaatccgaagatgaaattagcaaaatacgtaaagctgctgagttagcagataagtgtatcgaaataggtgtttcttatttaaaagaaggtgtgactgaatgtgaagtagtcaaccatattgagcaaactatcaaacaatatggcgtcaatgaaatgagttttgatacgatggttttatttggagatcatgccgcatcacctcatggcacaccaggagatcgcagattaaaaagcaatgaatatgtactatttgatttaggtgtaatttatgagcattattgtagcgatatgacacgtactattaaatttggtgaacctagcaaagaagcacaagaaatttataatattgtattagaagcagaaacatctgcaatccaagcaattaaacctggaataccattaaaagatatcgatcatatcgctagaaatattatttcagaaaaaggttatggtgaatatttccctcatcgcttaggtcatggcctaggattacaagaacatgaatatcaagatgtttcaagtactaattctaatttgttagaagctggcatggttattacaatcgaaccaggtatttatgtacctggtgttgcaggtgtaagaattgaagatgacatacttgtcactaatgaaggatatgaagtattaacacattacgaaaaataaggagtgggataaaaatgaaaagcttgttacaagcgcattctcattcagtcaaacactgccaatataacattgtagcgcctaagacataaatttttatccaagtctaaatgcaatatgtaacaaacaagctagaaacacatatgcaggtatgttcatcagtaacatgtaatgaatcaaatcaatatcattcatgttcgatgatttcttcgcattgtttctagctttaatttatcattatttaattttaataaccaaggagatgataacgtcattctttagtacgctgtaatccattcccttttcatcaaattcaaattataattgtaatgcttcttctacagatttatattccatttcaaatgcctctgcaacgcctttattggttacgtgacctttgtaagtatttaaacctaatgataatggttgatttgatttaaatgcttctctataccctttattagctagcatgagcgcataaggtagcgtagcattatttaaagctaacgtcgaagtacgcggtactgcacctggcatatttgcaactgcataatgaaccacaccatgcttaatatatgtaggatcatcatgtgtcgtaattttatcagttgtttcaaaaataccgccttgatcaatagcaatgtcaataataactgacccatttttcatttgtttaatcatgtcttctgttacaagtcttggcgctttagcacctggaattaaaactgcacctattactaaatcactttgtttaacatacaactcaatattcaacggatttgacataattgtatgtacacgtccaccgaataaatcatctaattgttgtaaacgctttggattaacatctaaaatcgtaacatctgcacctagtcctagtgcaattttagctgcatttgttcctgcttgaccaccaccgataatagttactttacccttaggtactcctgggacaccacctagtagaattcccataccaccattaagtttttgtaggaactctgcgccaacttgagctgacattcttcctgctacctcactcattggtgataacaatggtaaagatcggtctggtaactgcacagtctcatatgcaatactaattacttttctatctatcaaagcttgtgttaatttttcttcatttgctaaatgaagataagtgaataatacaagcccttctttaaaatatggatattcagattcaagtggttctttaactttaataaccatatccacatcccaaacttttgcttgttcagcaacaatctcagcacctgcttctttgtaatctacatcttcaaagaatgatcctgaacccgcatttgtttccactaaaacagtatgcccactttctactaaagcgtgcacaccacttggtgataaaccaacacgattttcattatttttaatctcccttggtataccaattttcataccatccacctccataatcatcttaacgcgaacattttgaaagcgcaatcaaaaatccacaaaattgtaaaggttattacactgacttttccgaaaattgtggtaaaatataattaagaaagaacaaggaggcacttactatgattacttacaaaaatattttaatcgcagttgacggttcacatgaagcggaatgggcatttaacagagcagttggtgttgctaaacgtaacgatgcgaagttaacaattgtgaatgtaattgattcaagaacgtattcttcttatgaagtttatgatgctcaatttactgaaaaatctaagcattttgcagaagaattattaaatggttataaagaagtagctactaacgctggtgttaaagatgtagaaacgcgtctagagtttggctctcctaaatctatcattcctaaaaagcttgcacatgaaattaatgcagacttgattatgagtggtacatcaggcttaaatgccgtggaaagatttattgttggttctgtatcagaatctatcgttcgtcatgcgccatgtgacgtgttagttgttcgtactgaagagttaccagcagacttccaaccacaagttgcaacaactcaattacgtgaaaaatatcaaaattaaatatagatgatcattagataactacttgatcattatgaaccaagtgcaactttctgcacttggttttttattgtttataaataaaactcacttaataatgttttcataatcttcttcgactacttaattctttaagatattcgtgaaaagagacattacactagttaattttcaaacaatacaaaaagcgtctacctcctacatataattgtagcggagatagacgcttaatatttatttaaaaattattttaaaccaccgaatgtcataacatcacgggcaatcatactttcttcatctgttggaataacgacaactttaactggtgaatgaggatagttaataaatccttctttaccacgtagtaagttttcatttttcttaggatcccagtaaacacccataaattctaagccttcaagaactttcgcacgaatttctactgagttttcaccgatacctgctgtaaatacgataacatcaacaccatgcattctcgcagcatatgatccaatatatttgtgaattttagaagcaaatacatctaaagccatttgtgaacgtgctttacctgattcagcttcttctgataagtcacgtaaatcactagatgtacctgataatcctaataaacctgattctttgtttaagatttccaatacttgttcagcagttttacctgttttttccataataaatggaattaaagcagggtcaatattaccagaacgagtacccattgttacaccagcaagtggtgtgaagcccattgatgtatcaatagatttaccgccatcgatagctgcaattgatgctccattaccaatgtgacatgaaataatacgtaaatcttcaattggcttatctaacatttctgccgctctttgtgatacaaatttatggcttgtaccatggaaaccatacttacgaatgccataatctttataataatgatatggcaagctatatagatatgctttttcaggcattgtttgatggaatgctgtatcaaaaattgccacatgagggatatttggtaataatttacggaaagcacgaatacccatcaagttagctgggttgtgaagcggtgctaattcgcttaattcttcaatttccttttcaacctcatcagtaatagctactgattcagggaatttttcaccaccatgtacaacacggtgacctgttccatcgatatcgttaatatcattaataatattgtgcgctttaaaagcatccaacatgatatcaactgcctcaacgtgatccttgatatcttgtactgttttaactttttccccgttgacttcaattgtaaaaattgaatccttcaatccgattctttctactaaaccttttgttactaattcctcttcaggcattctaattaattgaaattttaatgatgaactaccagcattgatagccaagattaattttgacataagtaatgatcctccatcgtttgctttttatactatttcatttttcattttatcattcatacagttttatgactatactattacagattattttttaggacgatttgtgtccatccactgatttaactctgtcataaatccttgaaattgtgaaggaattttgaaatcaggaatatttgccaataatacttcaactggctttgtttcacccgattttttcttttgtaaaattaatatagattttcgcgctttttcatttttaaataaagttggtggtaaatttaaaaatgcttgcatctctgtctctgttgcaatatatttttcaagctgttttacatgttcacctgtaaaaatattacttggtaccactagaaaggcatatccagcatcttttaatgcatttattgcttgttctattaataaataatgtgaataactatgtccttcttcaaaacctagcttaaactccttacttctttcatcaattggataatagcctactggaaaatcaccaataacgatatctgcttcttctaatggtagtggcatgatggcatcttgaggatacacatcgaaaggaatttctaagaagtttgctaaatgtacactaacacgtgataaaactggatcaacttcaattaaatgatgcataaccgcaatttcaggtaacacttcttttacagtagcacttaaatgaccggcaccacttgcaatatcaacaatatgtaattcttcttggttgttcataaaacgctcaactaaaaatcctagtatcaatccaattgaatctggtgtaatttgatgatttgcttgtatcttttcttcctgcattaaacttaaatatgcaaattggaatgctttacgtcgatcttgtaacgtcgattgttctaacaatcctctttcattggtatatacttgttccattgctagcccaagattttcaataaaactttggccattttcattatttaatgttttagctttttcatctaatgtatgaaacaagcgttccataattgtttgttgttctgccatattcgtccctctccaataaaaagtgcccataggtcttagcaatcatagaaaacaattctattttaatgctgttgacaacgatggacacgatgtatacattttaagatttatctctttaatgattaaatatttttgtatgcagctaaagcagcatcaaaatctgggaaatcagtaccttcactaacgatttctttataaacaactttattatctgcatctaatacaaatactgcacgagctaataagcgaagttcttccataacaacgccatagttttcaccaaatgataagtcacggtggtcacttaatgtaatgacattgtctaaacctgctgaagcgcaccatcttttttgtgcgaatggtaagtctgctgaaattgtaagcacaatcccctcttctttagaagcatcagagttgaatttgcgagtctgctgatcacaaacacctgtatcaattgatggtaccacactaattaatttctttttaccagcataatctgctaatgttacttgatttaagtcattatctaacactgtaaaatcaggtgcaaaatcaccttcattaatttgttgaccttttaagtggattggtccacctttgaatgttatttcagtcatatacttgacctcctgcattttaaaattctaactacatcatacgacaatttatggtttgattacaattttcatgctttaatcaaaagcaaatttaattttatacaaattgttgaatataatcaaaagcattttttaaaattaaaatagcagtaataataataaataatacttttacataaccaacaccttgtttaatagcaaaatgagccccagcatatgacccagcaatcatacttatagccataattaaacctattacataatctacttgtcctaataccataaataatacaagcgcacctatattagaagcaaagttcaaaactttagcatttcctgctgcacttaaaaaatcaaaaccaaagactaacaatacaaaaagcataaatgaacctgttcccccacctacaaatccatcataaaagccgattaatataaaaagtgctgcaaatattatggctttcttaaatgtaaattgagtaaacgtgcgtgtattgccccaatcttttttaagtaatgtgaatataaacaccgacgaaagtgcaatgatgattaaaggtttcaatatttgtgacggaaccatcgttgcaatatatgcgccacatgcagatgccaaaaatacaaaaccaaataatttggcaacaacatataagtccactttaccggaccttataaactttatcgtactagttaaagaaccaaacgaacttgccaatttatttgtacctaaagccacagatggtggtagaccgattgctaataatgctggcgtagaaattaaaccgccaccccctacaaccgaatctataaacgccgcgataaaaccaaataaaattatgattataatcatcgttaagttcaaatccatagtttaacatccccttatgtttaaatttactctaggattttatttataaaaagtcgtttattaattggtttgtttgctgttctttaatagttttataatcactagttatttcaagtgtttcaatattttcaacagcacgattaatcatctcttcaaaatcaaagacactttcatattggactaccttatcaaagtttggttcggttactggatttttaggggtgaaaattgtacaacaatcttcaaatggttgaatagatgtttcaaatgtaccaatttctttcgatttaataataatttcttctttatcgtaagttaataaaggacgtaatacaggagtagaagttacattattaattgcatacatgctatgaagtgtttgactggctacctgccctaggttttcaccatttacaatagctaaagcccctatttgatgtactaatttatcagcaacacgcatcatcatacgtctcgttgaagtcattgtatatcttggatgtacaactttatttacctgtttttgcaattctgtaaatggtacaatatgcaatttaattggtccaacacgttcagctaaaatacgtgtcaattcaataactttttcttttgcttgatcacttgtaaatggtggactatggaaatgaatcgcttcaattgttacgccacgtctcatcacttccatcccagcaactggtgagtctataccgcctgaaagcattagtaacgtcttaccaccagtaccaactggtaatccacctgaacccggaacaacttcttcatacatataaattgcatctaatctaacttccactcgaatttcatgatctggacgtttgacattcactgaaatattgtcgaagtgcttcaatactgcaccacccaattcacgctgtaattcatacgtatccattgggaaatttttatcggcacgcttcacatcaattttaaatgtgctgttttcttcaaattgctgcgcaaatttaattgccgctgcacttattgcctctattgttttttctacttttaatactggactaatagatttaataccgaaaatttttgataatcgatatgttatttcatttatatctgcatggtcttcaagttcaatatacatacgatctcgtttgcctttaacgacaaacccatcaagtccttttaatgacttatttacattatttcttaattgatttacaaatttctttctatttgaaccctttaatgttaactccccgtatctaacaagcaagtgatcatacttcattattttagcaactccttaatttcctcataaatgatgataaatatttctttaaacctcgctatatcttctttagttgtagtagccccaaatgataatcttatactaccttcaatagatttgtctgataatcccattgcagccaatacttcatttaatttattacgtttagatgaacaagcacttgtcgtagatatcataatgtcatattttgaaaaagcattaactaatacttcaccttttacgccaggaaaactaatatttaaaacgaatggtgaacctgaagttgaagaattaatataaactccatgatatttatttaaaaattgacggacgtcattatttaactcagtaacaaatgcattcaatgcttcaaagttttcattagctatcttcatcgctttaaccattgcaatatcatttggcaaattaactgttccacttctaacgccatattcttgaccaccaccatggacagttggttcaacattttgaatgtgatttacaagtaagacgccttgtccttttaaaccattaaacttgtgtccacttaaactaatactatctatgttattgagatccattgaaattttgccgaatgcttgaaccgcatctacatgaaaatgtgccttaggataattttttataactttagccatttgtggaataggctgtatttgtccagttacattatttacatacatacatgttactaaaccgactttgtctgacattaattctttgaagtgttctaagttaatactgccatctttctttacatcaacatatttaactttaaatccttcgtgtgcttccaaatatcttacaacctctaatacggacggatgctctaacacggatgtaattatttccttcgctgtatcaaatttacgataggcaataccttttaaagcaagattattggattcagttgcaccactagtgaatacaacatcataatttgtttttgaattaatcattgcattaatttgggtttttgcttgttgtagtaattgatttgcctgcaaaccagctttatgcggactattcggattataatacattgattgatttacttttaaataagtatctaacacttcttcaaatgctttcgtcgttgccgcattatctagatatatcaaaataaacacttctctttcattaatcatcaatcgttaaaattgttttactcaagcattatactattatccgacaaaaaataaaggttatagcgcaaaataatcttatttctacttattaaataagaattagactatttcactctatttaaacagctgtgtgattatgcttttttcactacttatattaattaaaacaacacatttgattacgtttatctttaaacaattgctatttatatttattgtccctttcatttatccatataaaaaagaagctagacaacgtatcgttggctaacttcaattattaaactcatcagtccaatttgacagagtgctcatattatttaagtataactacatactagtttctattgcttaataacttcttcttcaatatgtttagtaacacctggctcaacactttcaagagcttgctctgcaatttcaatcgcacgcttatagcgattatttttaaataatcgttcagcttcatttaagctcttatcaacattgctatagtccttacgatatctatttccatattgaattaatttctctgcataaacagcattaacaagaacatcatttgcttcatcttcaaatgtattcatttgaatcacaattttagacactttatcttttaactgtttaacgtgtattggacgttcactaaattgttcgttaacatcacgaacttcatgatcaatttcatttttcatgatgataaacctttcaggaacgcttgttaagttagaagcaagtaatcgacgatacacttcttctttcttcgattgtactcgtagcagattgtcttctgcttctgcttcatcttcacgcaattgaatcagatgattttgtagcttttcttgtttgtcattaataactgtgacatgatcttctaaatattgtaaattatcctgaacctcgctatatcgcacagcagatttagacatttcttttaaaatatcatcatatacagaaattaaactttgaatttcattttcaaattgacgaacactctgagcatcagattcatttatatagtagttttcacgtacatattcaatttctgtttgcaatgtataattcatgtctttagctttgaataagttatccgtaatgatatcttttgtttcttcgacatcatttttagctttaacttcatgttcaattaaatcatacatgtcatctaacttatcattgatattagctagtttatcattagcttcttctaattctaagcggctaattaatggttcaacgaaactaagctctgtttttaagctttgtaatgtactgtctactttcacgtgatccagatcatacccttcaactttaagatcacggcaaccatattttaaatcttggaattgaccaggtaattctttttgagtttctctaattaattctggtatttcttccatataagatcttagctgtttcatttgttcattcaaggcagctatatggttgtgcgcttgtacataattaccatcagcttttagtacttcatattgctctaaccttggctcaaatttttcaatttcagtttcaagtagacttgctgcctcaccaaattgatgacgatttgctaaaacatcacgtttcatttcacgataatcaaccttacatttgtcatataattcatcattatctttgtataacgcaataatttcatttacatcttctaattgttgctgatagctttgttcgtaactatccatcaactcatttgcatcatcaatttcactttgagatgcgttgaaactaaatttatctaataaagcctcagcattatggattttttcttccacaggagctagatacttatttgtactttctacgttgtcctttttcattgcatcgtatttcgtttttgtttcaccttttaaattcaacttagataattgtgcaaggttttgatcaaaaggtaacgtctcaatttcatttttacgttcgattgctttttcaataatttgtcgtttatttgaacgtaaatagaataatacacctacagcaatcaatataatcacaattattgccaaaatgatatataacaccatatgcttctcctcctaatttatcattactattataacgtaattttgcttaaggataaattataaaatgaatttattgccataatattttcgaaattctatactattataaaatctatgaaaataagaggttttaaatatgacaacaattaacccaacaaactacacattattaaagaaacaagcagcaagccttattgaagatgaacatcacatgattgctattttaagtaacatgtctgccttattaaatgataatctagatcaaattaattgggttggcttttacttattggaacaaaatgaacttatacttggacctttccaaggacaccccgcttgtgtccacattccaattggaaaaggtgtatgtggtacagccgtttcagaacgtcgtacacaaattgtagctgatgttcatcaattcgaaggacatatcgcttgtgatgctaatagtaagtctgagattgtcgttccaattttcaaagatgataaaattatcggcgtcttagatatcgatgcccctataacggatcgatttgatgacaatgacaaagaacatcttgaagcaattgttaaaattattgaaaagcaactcgcataaaaggacatcagcattttcaataaagtgttgacagttagcaggaaaatgttacaataatctttgtgtgaattaacgaaagtagcagttgtatattattgagcgctatgttgttcccaatgcggacgtgtcacgtaactgtcgctataaggtgaagacacataaaacaatatatcttagtaagcatgcaacactcttttttgtttattcataacaacaaaaaagaattaaaggaggagtcttattatggctcgattcagaggttcaaactggaaaaaatctcgtcgtttaggtatctctttaagcggtactggtaaagaattagaaaaacgtccttacgcaccaggacaacatggtccaaaccaacgtaaaaaattatcagaatatggtttacaattacgtgaaaaacaaaaattacgttacttatatggaatgactgaaagacaattccgtaacacatttgacatcgctggtaaaaaattcggtgtacacggtgaaaacttcatgatcttattagcaagtcgtttagacgctgttgtttattcattaggtttagctcgtactcgtcgtcaagcacgtcaattagttaaccacggtcatatcttagtagatggtaaacgtgttgatattccatcttattctgttaaacctggtcaaacaatttcagttcgtgaaaaatctcaaaaattaaacatcatcgttgaatcagttgaaatcaacaatttcgtacctgagtacttaaactttgatgctgacagcttaactggtactttcgtacgtttaccagaacgtagcgaattacctgctgaaattaacgaacaattaatcgttgagtactactcaagataatacgttcaatacaaacacccacaattgtgggtgttttttttattaatttaaaaatgatagattcaaaattatatggagctaccctattttacaatcaacttagaatttacaagtcttatttgtttaattatctttagtatttcatcattagtttttaaaattatcaattgcgatatacgaatcctcatccctctatcaaattaccattcatcgtctcacttaataaataatttcggattatctgtaattaatccatctacacccatttgtcttaatttttctccagttttcaatttattaactgtgtatggcataacctgtaattgatgatgatgtgctttatcaacaaattttctggtcactaatgcataattaggattaacataactagcaatttgagcaattcttgaaaagtttggctttttataccaataattacgtttactacaaagcacacctaattcatatatactgcccaatgtgtttaacttttcgatgcattcgatatcaaaagattgtataactacttgtgtcgcatcgactttcttttcttccaaaaatgccagcaatttacattctatttctggatataaattcggacttttcaattcaatcaatagctttttatcatactttaagcataatgaaagtacttcatctaacgtgggtattcgttctcccttaaaagcaacatctttataactaccaaaatcaaatgattttaattgcgataatgtgtaatcagcaatacgccccttaccatccgatgttctatcaattgtttcatcatgtatcacaacaaaatgttggtctttggtcaaatgaacatctatttctaacatagcaacattgagccccattacctctcgataaccgaccattgtattttcaggaaaatcactcggcaatccacggtgcgaaacaatttgtaattcatctttcagtttattcagagtcattgataagtcacctttctgttaaactttgataaactattctaaaattaaactatcacaattatattggaggttaaagcaattgcatcaacatgactttaaagtccaaacttcttggcaaggtggtcgtaacaatgtcggaaacgttcaaggcgacatactttcagagaatatttctatacctgcttctttaggtggtgttggtataggaacaaatcccgatgaaatgttagtatcagccgcttcatcatgttatatcatctcattagcagctactcttgaacgtgcaaagttcacagatatttcaattgaacaacaatcgattggaacagcttgtttaaataacggaaaattcagtatgtcaaaaattgtgcaccatcctcaaattcaaattccaagtgatcaaatagcacaattagaaaagcgattaccaaaattgataacaattgcagataataattgcatgatttcaaatgctgtaagaaataatgtggacataaaaatctatcccatcattcaggccaaataaaatcgttaagtgataacgtttgttcgacaatatagcgttatcacttttttaggcttttaaattttcagaaaatttgctaaaatagtgaaatcttatttataggaggcatataaatgtattatcatcaaccgttgttattaacacctggcccaacccctgtacctgatgccattatgagagaaattcaagcacctatggttggtcatcgttctaaagattttgaagacatcgcacaacaagcatttcaaggtctaaagccaatatttgggagtcaaaatgatgtacttattttaacatctagcggtacaagcgtcttggaggctagtatgttgaacattgtaaaccctgaagatcacttcgttgtcattgtttcaggtgcctttggtaaccgatttaaacaaattgcacaaacttattacaaaaatgtgcatatttatgacgtaacatggggagaagctgtagatgtcaaagatttcatcaatttcctttcaactttaaatgttgaagttaaagcagtatttagtcaatattgcgaaacatctacgacagtgctacaccctattcacgagttaggaaatgccattaatcaatttaatagtaatatttattttgtagttgacggcgtaagttgcattggtgctgttgatgttgacattaacaaagataaaattgatgtacttgtttctggtagtcaaaaagcaattatgttacctccaggattagcttttgtagcttatagccaccgtgcaaaagaacatttcaaagaagtaactacgccaaaattttatctagacttaaataaatacatttcgtcacaagctgacaattctacaccgttcacaccaaatgtgtctttatttagaggtgtaaatgcatacgttgaaaccgtaaaagcagaaggtttcaatcacgtaatagcacgacactatgcaattagaaatgcattaagaagcgccttaaaagcattagatttaactttattagtcaatgataaagatgcatctccaacggttacagcattcaaacctaatacaaatgatgaagtgaaaataatcaaagatgaacttaaaaatcgctttaaaataacaattgctggtggtcaaggccatcttaaaggtcaaattttaagaattggtcatatggggaaaattagtcctttcgatattttatcggtagtatctgctttagaaattattttaactgaacaccgtaaagttaactatatcggtaaaggtatatcaaaatatatggaggttattcatgaagcaatttaatgtactcgttgcagatcccatatcaaaagatggtatcaaagcattattagatcacgaacaattcaatgtagatattcaaactggcttgtccgaagaagcattaatcaaaattataccttcataccatgctttaatcgttcgtagtcaaactacggttactgaaaatatcataaatgctgctgattctttaaaagtaatcgcacgcgccggtgttggtgtagataatattaatattgatgctgcaacattaaaaggtattttagttattaatgccccagatggtaatacgatttcagctactgaacatacactggcaatgttattatcaatggcacgaaatattccgcaagcacaccaatcacttacaaataaagaatggaatcgaaatgcatttaaaggtactgagctttatcataaaacattaggtgtcattggtgctggtagaattggtttaggtgttgctaaacgtgcgcaaagtttcggaatgaaaatactagcttttgacccttacttaacggatgaaaaagcaaaatctttaagcattacgaaggcaacagttgatgagattgcccaacattctgatttcgttacattacatacaccactaacacctaaaacaaaaggcttaattaatgctgtcttttttgccaaagcaaaacctagtttgcaaataatcaatgtggcacgtggtggtattattgatgaaaaggcgctaataaaagcattagacgaaggacaaattagtcgggcagctatcgatgtgtttgaacatgaacctgcaactgactcgcctcttgttgcacatgataaaattattgttacacctcatttgggtgcttcaacagtcgaagctcaagaaaaagtggcaatttctgtttcaaatgaaatcatcgaaattttaattgatggtactgtaacgcatgcagtgaatgcacctaaaatggacttaagcaatatagatgatactgtaaaatcattcatcaatttaagccaaacagttggtgaattagctattcaattaatgtacaatgcaccaagctctattaaaattacgtacggtggcgacttagcctctattgatagtagtttattaacacgtacaattattactcatattttaaaagatgatcttggtcctgaagtcaatattatcaatgctctaatgttgttaaatcaacaacaagtgacattaaatattgaaaataataaagcagagacaggttttagtaactacttagaggtagaactatcaaacgatagcgattccgttaaagttggcgcttctgtctttacaggtttcggtccaagaattgttagaattaataatttttctgtagacttaaagccaaatcaatatcaaattgtgtcatatcataatgatactccaggtatggtaggaaaaactggcgcattgttaggtaaatacaatatcaacattgcatctatgactttaggtagaactgaagcgggcggagatgcgctaatgattttatccgttgatcaacctgtttcaaacaatataattgatgaacttaaacaagttggtgaatacaatcaaattttcacaactgaattgacggtacagtcataaacaatttatgtaaattcaaaatgccaagaagacattggattacttccattgcttcttggcattttttcattattaatttcattgtaactcaatatgaaacctttggttcaatcattcactacaagttatgctgtcaaacaacaatcaaattacaaattatctagtacacctctaagttcacctaaatgattaataacatagtcggcatgatgcgcttctaactcacctgcagcatccttaccttttaaacctgttaatgttccaataaacgttgcacctattttttgagcacttaataagtcagctaacgaatcgcctactataaatacgtcatctttatttacaatgttatcttgcttattgatataagattcatatttatcgcgattattaccatataaagctgcgatataactaaaaggattcggctttcctaatggtcgtgcttgcggatacatattctctgcttctaaaacatcacttgctgttgcaataaaatcagcttcaaaatatggtaacaatcctaaattttcaaatggcacaacagtctcagtataaggacgacctgttgcaatacctaattcgaaaccagcaccttttaaatcattcagaagtaccttaacttcatctactggtctcaaaataatttcttgataaatataacctgtcttaaaagtagttcgtgctattttcttttcaacatcttcatacaacttcgatcctaaataccattcttgataaacttcttgcgctaacgtccataatgcacccttcaaactaaataaagtagcatccgaaacatgtaactctgttgttgcaaactcttccaaagcagcataaatattatttttaccaacttttacattatccaaaaattgtaaaggtagttgttcatttaaattaaaacagtctgctaagtttgtgcttatattttgcaacttcaattcgacaggctcatcttgatacatgaatgcctcaatttcatcatgtgataactttttcaaaatatcaattaaatgaatactaaaaacgataaataacatatcccaatttgaattcagccctagcgattttaatttgtttaaaatcttatctttttgaaaaattcgattcctaatgtcttgtatatcgttatcagtcaaagtttcccaatctatatgtgaatgaagacctaaataacacttatccattaataattcatataccgttaatgcagagacatcgaaacaacgttcttcacttaaaaaaacgccatcaacatcaaataaaattttcttcacaatccccactccatttctgaaaattcagatataaatcattctactatttgactaaaaaaagcgcaaaccctattgaagttagatttgcgctttagctgtttaaattttataaatgtttttcaatttcatcagcaacctgctgtacgtgtgtaccgacaataacttgagttgaatgtttgccattaacagtaacaccaactgcaccggcgtttttaatcttctgtttatcaataatagatgtgtcttttaactctagacgcaaccttgttgcacaattggttaaattaacaatattctcttgaccgcctaaaccttctaatatttgtatagcatgttgatgatatttactttgtttaatatcattttcaccaggagcaatattatcttttacaactgttgggtcaactaattcattttcacctctaccaatcgtattcaagttaaatacttggattactacacggaaaatcacatagtataagatgaaaaatacaacaccttgaacaagcaacatcaatggatgatttgatactggattaattagtgataacacataatctatcaaacctgcactaaatgaaaatccagctgtccaatggaatgtagctgcgataaataaagataatcctgttaataacgcatgaacaacatataagattggcgcaacaaacataaatgcaaactcaatcggctctgtaacaccaacgaaaaatgctgcaactgaactcgctaggaaccaaccgtaaacttgttttttctgagtagttttagctgtatgatacattgctaacgcagccgctggaataccgaacatcatgattgggaagaatcccgcttgatagcgtcctgtaataccttttatagcatctttgccactttggaatttaccaatatcattaataccaatcgtatcaaaccagaacacactattcagtgcatgatgtaatcctgtaggaattaataatctattggcaacaccatatatgaaagctccaaacgatcctaaaccgactatagattcaccaaattttacaatccatgaataaagtagtggccataagaataacaatatgacaactaaaaatgtacagtaaaatgcagtcataattggaactagacgtttaccactaaaaaatgataatgctaatggtaattctgtttcactaaacttattgtatgcataagctgctattaaacctattacaataccaacaaagacattgccattattcatcttttcaaaagctgaatttatttccgaagctttcattcctaataaaggcgctaatttcattggtgataatacaactgtaactaaaaaatatcctaacgtagctgcaagcgcgactacaccatcatttttctttgccattcctatagctacaccaattgcaaataaaatacctaattgctctaaaatcgtagtacctaccgtagtaaagaacattgcgattttcggcgtcgcatgaagtgcatttaacgtattaccaattccggcaataattgctgcagccggtaaaatggcaactggtaacattaacgaacgccctaaattttggaaaaatttatacattgaatgtcatccttcttaaaataatgtagaaatataaagattactaatgtaactagaataactacttcgatactccgttatagtcacctaggcttactaaccagctatatttctacctcaagttattttataaactttttacaatttcatgcaattcttgttgtaactttgctgttcgtgtttcaatctcttttgtaatataatcgatacgctcgtttcgttttaaatctttaggtaaatcgttaatatcgattggtttgccaatatttatgtatgcttgtcctgttaaaagaccgtgaatcttagtaggaccaacataagcaacaggtaatattggtgacttacttaacattgcaattgttgaagcaccacgtttcaaaggtgcaccttcttgcgatgtgcgagaacctgttgggaagataccaactgtcttattatctttcaacaaattgattgggcgttttaaagtactaggtcctggattttcacgatctacaggaaatgcatttaaagacgttaaaaatttaccaatccatttatttttgaataattcttttttagccatataatgaatttgattaggatataatgccatacctagcataatgacttcgttataactttcatgcgtacaagttacgacatatttactatccttaggaatattatctttaccgattacgtataatgattttgacattttaactaaaatgaaattcaaaatcttactaatcactgaatacattgtgccacctacttaacttatttgtttataacaactagattttatcactatatttttactagaacaagatagtctgaaaatacatctaaagttgtatagtgtattactagcaataattataaaaaaaagacataattaaagcatatataaatcatataatggaggttaagtatgtcagattttaatcatacagatcattctacaacaaaccatagccaaacacctagatacagaagacctaaatttccatggtttaaaacagtcatcgttgcattgattgctggaattattggtgcacttctagtacttggtataggcaaagtattaaatagtacaattttaaataaagatggttcaactgttcagacaacaaataataaaggtggcaatcaattagacggtcaaagcaagaaattcggtaccgttcatgaaatgataaaatctgtctcccctacaattgttggagttattaacatgcaaaaagcatcaagtgtagacgacttattaaaaggcaaatcatctaaaccatctgaagctggagtaggttcaggtgttatctatcaaataaacaacaattcagcttatatcgttacaaacaatcatgttattgatggcgcaaatgaaattagagtccaattacataataaaaaacaagttaaagcgaaattagttggtaaagatgcagtaactgatattgctgtacttaaaattgaaaatacaaaaggtattaaagcgattcaatttgccaactcttcaaaagtacaaactggcgatagcgtattcgcaatgggtaacccattaggattacaatttgctaactctgtaacatctggtatcatttcagcaagcgaacgtacgattgacgctgagacaactggtggcaatacaaaagttagcgttcttcaaacagatgctgctattaacccaggtaactcaggtggcgcattagtagatattaatggtaatttagttggtattaactcaatgaaaattgctgcgacacaagttgaaggtatcgggtttgctattccaagtaatgaagttaaagtaacaattgaacaacttgtaaaacatggtaaaattgaccgcccttcgattggtattggtttaattaatttgaaagatattcctgaagaagagcgcgagcaacttcatactgatagagaagacggtatttatgtcgccaaagctgatagtgatattgatcttaaaaaaggtgatattattacagaaattgatggcaagaaaattaaagatgatgttgatttaagaagctatttatatgaaaataaaaaacctggtgaatcagtcactgttaccgttatccgtgatggtaaaacaaaagaagttaaagtgaaattaaaacaacaaaaagaacaaccaaaacgtcaaagccgatcagaacgtcaatcacctggccaaggcgatagagatttctttagataatttacagacagaaaagtacattaagagcctactcattacattcttaggaatgaatatgagtaggctctaatttatttagctatgcaattatatttattgatagttaaccatgaagtattttttcttaccgcgacgaataatcgtaaattcgccatcaattttatcttctggtgctaaagcataattaacatcttgttgtctctcaccattaatataaatcgcaccattgttaacatcttcacgtgcttgtcgtttagaaggagaaatgcctgtttcaataaggacttcaacgatatttgttgtgtcatttgataatgtcacttgaggcacatctttaaatccatcttttaattctttcgctgataatgattttaaatcaccactaaataatgcttgtgaaatacggattgcatcatttaatgcatcttcaccatgaataaatttagttacttcttcagctaatgttttttgagcttcacgtaaatgcggtgcttcatttttagattgttctaagcgatcaatttcttcttttcctaagaaagtaaagtattttaagaatttaattacatcttcgtctgattgattaatccagaattgataaaattcataaggacttgttttttcagcatctaaccaaacagcacctgactcagacttaccaaatttcttaccatctgatttagttacaagcggaatagttaaaccgtatgcgtctgtttgaccatacatacgacgcattaattcaataccacttgtgatattaccccattgatctgatccacctacttgaatcttacaattcaattctctattcaaatgaccgaaatcaatagcttgtaaaatcgtgtatgtgaattctgtatatgaaataccatgttctaaacgactttggattgaatctttacctaacatgtaattaacgccgacgtgtttaccatagtcacgtaaaaaactaattaatgagatttgtcctaaccagtctctattattaacaagcactgcaccatggtctgttccaaattcaaaaatattgtgcatttgcttactaataccttcgatatttttatctacttgttcttctgtttgtagcacacgttcttctgatttacctgatggatcaccaatcatacctgtaccaccgccaattaaaacgataggacgatgtccatgttcttgaaaacgtcttaatgttaagaatggtagtaagtgaccaatatgtaaactatctgccgttggatcggcaccgcagtataacgtcacttgttctttatttaataaatcttcaataccttgttcatcagtttgttgataaataagacctctccattttaaatcttcaattaatacattcgtcattattatttcctcctatttataattatttattgaatacttgttaaaatactttaaagttttttgaacgtaaaaaaaacccttacaacaaatatgtaagggcgcgattgcacgttaccaccaaacttaaacataatcataagataatgttcactctattaatgatacgttcattaataaacgtaggacatgttagttataaaggtgtattcatattattaaaaacactagttcacagcgaccactagctctctgatgatttcaaataatattacttgtccttttatcctattctttatgcattttccctaattataattaacgttaaaataaaagtcaaattgcttaaatatggtatactatacgtaatttaggaggttaaagatgacgaatcaagacaacaatcatcaattgaatcatcgtatatatcattttgaaaagatatataaagctatcaaacatgtcattgtttttatatttatgattttcattgccatcgttgctatcgctgtgattgcgatgtctttatattttcatcatttaactaaaacgtccgactcattatcagatgatgctttaataaaaaaagttcgacaaatacctggcgatgaattattagatcataataacaaaaatttattatatgagtataaccattctcaaaactcactcattataggccctaaaacatcaagtccaaatgtcattaaagcattaacgtcatctgaagacactttattttataaacatgatggcatcttaccaaaggcgattttaagagcaatgatacaagatatttttaatactgatcaaagttcaggtggtagcacaattacacaacaacttgttaaaaatcaagttcttaccaacgaaaaaacatatagtagaaaagcaaatgaacttcgcctagcaattagattagaacacctactctcaaaagatgaaattatatatacatatttaaatatagttcccttcggtagagattataatggcgctaatatttccggaattgcatccgcttcatatagtctatttggtattccaccaaaagatttatcaattgcacaatctgcataccttatcggtttgttgcaaagcccatatggctatacaccctacgaaaaagatggaacgttaaaatcggataaagatttgaaatatagtattcaaagacaacattatgtattaaagcgtatgttaatcgaagatcaaatcactgaaaaagaatacaacgacgcattaaaatatgatattaaatcacatttgttaaatcgaaaaaagcgttaattgatgctcactttttaaagtaaccacaacaatgaatccaaatattaaaaacagcagtaagattattttcaattagaaaatttctcactgctgttctttttatttactctaaaggaaagccattaaaccaatcaatagtttataaattaattgctttcacattgtctacaaagttaatcatacatatgctatatttagttaattatttagattcttttctgaatttaggaatgaataaagctaacatacctaataacgcatataagccccaccatgattggcttgaagttgtttctccagtttttggtagcattttagattgactaagtttgttttctttcgatggtgtgccggctttttcttttgttttcactgttttatctacagttttatgaatatcactcggcagatgttcagttgtttttttgtcagtaactttgtctgtattattataattttgtttcactacgtcaagctttgctgcttttccagtatgattatttttatcggcaatatgattcagctgtatgactttgtctttatttttattagagtctttatcagtatcgacattagatgacataccaacgctattatcggcatctttatccacatttctatcagtatctttggcaatttgagtatccatttcttttaaatcatatttatcgaagtgattattatccgacatatcggataaatgatcaacatcatgttgcacatctttatcaatattattatcagcatctttaaccacgtcagactctggttctatcacatctgctttatcagacgcatctttaggatttgttgcagtgctgctattttcagctacatctgtatcagcaaccttaccttcttgtcctgtttgtacatttagcggttcactcgtgttattttgtgatgtatcatcatcttttgtattgatatcctgatttataattctgacatgatattgaccttcataaccaatgtttgccacaacgactttaacaatcgcattgtaaactgctttgtcaggtatatatgggaaaatcagcgttctagaattatttttaggatctttagaaacagtagtgacacgtttaccttctacaattaaatctttccagtaactgtcatcctttgttttcatcactacatatttttgaccatttaaagttgctgtatagaatggatgttcaacaaagccgtccataactgactcactattttcttcactttcaaaaacaacaaaatgcgcttcttgtaaatctgttaattgatcatttgtaggtgtaacattttcaaattccgtcactgctgatttaacttgatcagctaactctactctagtttgatctaatttctttttatattccgccttatatttttctggcaatttctcttgtaatttttctaattcataaacttgtctttctaacgttttagctttgtgatacggagctaataatttttgtaaattgtatgtttcttcatccacatagtcgtctgggttattagtaataggctgtgcaaagaccattagcgtataatcatagtcttcatggatgttctcaccatattcaatagatgacacaattttaacttctctcgtaccattagatactgggaaacgaatataggcataatctttatcagaatcatatgatactaattcgactggtaactttttgtcaccttcataaacttcaaatttcttccatgttgaagctgtctttaaacctaattcaattattggtcctgtttttgtaaaaatgacagttgctggttcaacagtactagcataatgatagaactgtctttcacctttatcatttttcatttgaaaatcaattggtcgccaattatcagctgtatgttctttatcgatgatagccgggtttttaattgcatcttgtagtgattcatctgctggtggatactgttgattaacatccgactgattacttgactcattcgttttatcgttagtattaccattagaatttgtttcatgagctggttggcttgacgcttgatctgcattcgttgacgattttggttgtgcaggttgactcatattggtcgttgcctgcggttgattattagcattgttgatcgttgatgtattttgattagatgtattcgtgtttgtttgattacttgcgactgaacttgattgatcattcgttactactgcatcatttgtatctgattttacaagtgaaggatcgttataaataggtttagcaaatactaatttagtataatcataatttgtttcttctccatcatcaatttgagtcgaagaaacaattttcaattcttgtgtgccatctgaaactgggaaacgaatataggcatggtcttctggtacaggactatatgatacaagtctcactggcaatttttgattgttttcatagacttcaaacttcttccatgttgaagcagtattgatgtctaattcaacttctgctttctttttagtgtaatacacatctgctggatctttgatgctgaaaaagtgatagtactgcgtttcattgtttttatctaataactggaaattgacttgttctcttggacctatatcatgttctttattttctaatgcaggatctttaattgcatctttaagtgattcatccgctgcaggatagtttttcgcagtgtttgctggttgcgtagcaggttgtgtttgatttgtatccttaggtggctgagttgtagttgcattattattttgattttccgagattttatctgaagtatttgtattttctgctgcttgtgcttgatgttgagaagtaattaaaaatagtgtactgacaatgaccgatgcaacgcctagagttgattttctaatagaatagaaagaccttaattttgggtgatgtttgttcatgttgttaacaactcctattattagtgttaattgtagcgcatcccaattaaatattgcaacctattttattatttttttttaatatggaatattcattgcatcgctttcctattcttcaagcccactttttatcttcatatacattaattaaccaccttcaaacattgtcgttagattcgccaaattgaatctatttttagcacagcaaaaaaccgaactgctgaaataatgcatctccaacagtccggtctattaaactatttacttatctttattaaacaattgacatgatttattagaataacccaattgcatgaccatcatcagtaacatccatgtttaatgctgctggttttttaggtaaaccaggcatagtcatgattgcacctgtcaacgctacgataaatcctgcacctgttttcgcttctaattcacgaattgtaatttcaaatcctgatggtgcacctaacaacgtttgatcatctgagaatgaatattgtgttttcgccatacatactgggtaattatcccaaccattttctttaaattgttttaattgtttttgcgctttactgctaaacgttacttttgaaccgccatagatttcagtcacaatcttttcaatcttttgctctaatggtaattctaattcatataaaggtttaaatgaattaggttgatcaatgacttctaatacttcatttgctaagtcaacgccacctttaccaccttttttccaaacttcagttaaggcaattcgtacgttattttctttagcccaagattttacatattctacttctgcatcggtatcatgtataaatgcattaattgcaacaaccggttctacaccgaattttttaatattattaacatgacgctctaaattaacaattcctgcttttactgcttctacattttcttcttttaaattatctttcgctacaccaccatgcatttttaacgcacgaattgtcgcaacaacaacgacagctgccggatcaaatcctgcttcacgcactttaatgtccatgaatttttcagcgcctaagtctgaaccaaatccagcttccgttacaacgatatcagctaaatcacgtgctgtttcagttgctaaaattgagttacaaccgtgtgcgatattcgcaaatggtccaccatgaactaatgcaggtgtcccttcaattgattgtactaagtttggttttattgcatcttttaaaatcattgcaagtgcaccttccacttttaaatctgcaactgtaactggcttgcgatctctagtgtaaccaatagtaatacgactaattttatcttttaagtctttaatacttctacttaaacataaaatcgccataatttcagacgctactgtaatattaaagccatcttcacgtggtacaccatttgtaggtccacctaacccaacgtttacatgtctaagtgcacgatcattcatatctaatacacgtttccactcaatacgtctttgatcgattcctaattcgttaccttggtgaatatgattatcgataaacgcagacaatgcattatttgcagttgtaatcgcatggaaatctccgttgaaatgtaagttgatatcttccataggtaagacttgcgcataaccaccaccagtcgcaccacctttgataccaaatgttggtcctaaagcaggctctcttaatgcaaccataacgtttttatttaactcatggaatgcatcagctaaaccaactgtaaccgttgatttaccttcaccagctggtgttgggctcatcgcagttactaaaacaactttccctttgttttctcttggcgtaattttattaatgtcgattttagctttgtaatgaccataaggttctaatgcatcctctgaaatacctactgatgcagcaatatccttaattggttgtagtgttgattgattcgcaatatctaaatctgataaatgagtcaacttttttcgcccctttttgtttaatttatgcatttataatatgtaagttgtagctaagaaatttttacttacattcatataataacgaactgttaaaaacttgtcgactaaatcgggttagcgctttcatttttgcaataaattcacttattaaagttttgtattatacaacttttagcgcttgatactattgataactatatttttctattatttaaaataatcatcttccaaagatcatattaaaaataaaaagcaatataaagatatgccattattgttatgtcatcattttcaaatgctttctacgaaatgatatgacacaagttaacagttctttatattgcttatcgtaaagtaaacgattatttaaacattgacatgaaatatgttgtcaccctttattcttcgaaaaaaatcttcaataacattcatgtcattattccattgtacttaaatccccagcatctaaatttaattcccaagcttttaatacacgtctcataattttacctgaccgtgttttaggtaatttatctttaaattcgatttcacgtggtgctgcatgtgccgacaaaccttctttaacaaatatacgaatttcttcttttaattcgtctgttggttcatatccttttctcagtgcaacaaacgccttaattatttcaccgcgaaccggatcaggtttaccaataattcctgcttcggcaactgcttcgtgttcaaccaatttagactcaacctcaaatggtccaactcgttcaccagctgtcataattacatcatcaacacgtccttggaaccagaagtaaccatcttcatctttatatgccgaatcaccagatacataccagtctccaataaaatatgatttatatttttctggattcttccagatacgatacatcattgatggccagcctttttttatagcaaggttgcccattcgatttggtggtaattcattccctgcatcatcgataattgcagcttgaataccaggtaatggtttgcccattgagccaagcttgacgtccatcgttggatagttaacaatcatatgtccacctgtttctgtcatccaccaagtatctaacaccgttaaaccgtatacttttttcgcccattttataacttcaggatttaaaggctcacctactgatagaatcgaacgtaacgatgacaagtcatatttctcaacaatatcgtcaccagcactcattaacattcttaaagctgttggtgccgtataccaaatcgtcactttaaaatcttcaatcatactataccactgttctggcgaaaagcgaccaccagctatacaatttgtagcgccatttaaccatggtgcaaaaataccataagatgttcctgtaacccaacctggatctgctgtacaccaataaacatcatcttcttgtaaatctaatacatattttccagaaatatagtgcactaacattgcttgttgaacatgcaatacacctttaggttgcccagtagaacctgatgtataatgtaaaatcaaaccatcatccgactttaaccattcaatgtcaaattcatcgctagcagtttccatcaaactaatgaagtctatgtaattgtcttctacatcctcatctacgacaacaatttttttcaagtttggtaatttatctacaggtactcgaggtaacaatgccttattagtaattaacactttagcttcactgttctctaatctatccgcaactgccttttccataaatgcttcaaataacggcccaacaattgcaccaatttttaaaacacctaacaacgcaaaatatagttcaggtgtacgcgacataaatataaatactctgtcacctttgtcaacttctgcatgttcagacaaaacattcgctgctttattagataaccgttgcatatctttataagtatacgattcttttctgtgctcatctttgtaatttaacgctattttatcccctaatccttgatctacatggcgatctatgcattcatatgccatgttcatttttccagtttcactccaagaaaatgcttgttctacgtctttccaatcaaaagtattatatgtttcttcataatctttaaggttatgtttaccttgcgctcctttataaacttcgactttcatttgaaactccccctttgttatgtgaaaacgctttctttctcaatattatacataacatttctaattattcaaaatttttacttttatcctttttctagtattaattattgtaaattttctatataatgaatttaatacaatcacgacgtcgattgaggagttgaaaatatgaatcatttaaagacgtatcaatccgaagattattacattcatgacaagcaatttgttattgaaggtcctttaacacacgaagatttgaaagcgcttactttcgatgcgcatttaaccgcatttagagatgctgaagatcagtataaagctttgttagaaattacaacattaccagaaggtagaatttatgttgctcgccaagatcaactcattgtgggttatgtcactttccactatcctgatgaaattgagcgctggtctacaggtaagcttccatatttaatcgaattgggggcaattgaagtcagcatcaattttaggcaattacaacttgcagaaaagctgatacaacttagcctttctacaccagaattcgagaattatatcgttataactacagaatattactggcattgggatttaaaaaattcaaagttagatgtatttgactataaaaaattaatgcagcggttaatggcaactggtggacttgaaatattcgctacagatgatccagaaataacaagtcatccagctaattgtttaatggcaagaattggcaaaaacattacattagaacagcaacaagcgtttgatgatattcgttatatgaatcggtttttcttttaatttttggaatatcggagggattatatgcaacaacattcatcaaaaactgcatatgtttattcagataagttattacaatatcgatttcatgaccaacatcccttcaatcaaatgcgtttaaaattaacaacagagctacttttgaatgcaaatttattgtctccagaacaaatagtacaacctagaattgcaacagatgacgaattaatgttaattcataaatatgattacgtcgaagctattaagcatgcttcacatggcattatcagtgaagatgaggctaagaaatatggattaaatgatgaagagaatggtcaatttaagcatatgcaccgccatagtgccacaattgttggaggcgctttaactttagcagatcttattatgtcaggcaaagtattaaatggttgtcacttaggtggtggtttgcatcacgctcaacctggtcgagcaagtggtttttgtatatacaatgatattgcaattaccgcacaatacttagctaaagaatacaatcaacgcgttttaatcatagataccgatgcacatcatggagatggtacacaatggagtttctatgccgataaccatgttactacttattctatccatgaaaccggaaaatttcttttcccaggctctggtcactatactgagcgcggtgaagatatcggctatggacacactgtaaatgtcccacttgaaccgtatacagaagatgcatcatttttggagtgttttaaattaacagttgagcctgtcgtaaagagttttaaacctgatattattctaagcgtaaatggtgtcgatatacattatcgtgatccactaactcatctaaattgtacgttacattcattatatgaaattccatattttgtaaaatatttagctgattcttatacgaatggaaaggtaattatgtttggtggcggaggctacaatatttggagagtcgtaccacgtgcatggagtcatgtattcttaagtttaattgatcaaccaattcaaagtggttatttaccgttagaatggattaataaatggaaacattattcatctgaattattacctaaaagatgggaagatcgtttaaatgattatacctatgtcccccgcacaaaagaaattagtgaaaaaaataaaaaattagctttacatatagcgagttggtacgaatctactcgtcaataagtaacctaatctgcaacgattttaaaagataaataaaaggcattcttccaacacccatataatttgggtcgttagatgaatgcctaattttgtgaatttattttgtagttcctcggtattcaattctgtgaggtaaaactacatttggttcttctatcttttcatcgttcatatattttgttaataagcgcatccctactgcaccgatatcatataatggttgaataacactagaaagttgtggtctaaccatctcaactaatcgtgtattattgaaactaataatttgtaattcctctggaactttaataccagcatccattgcactatgcataataccaattgcttcttcgtcgctgatacataaaatggcatctggcaaattgcctttcattttggcaaaagcttttacgccttctttataactttcagcaccagaacaattcaatgtatcacctaattgaaggccatttttatttaacacttcagttaaaccttctaaaacatcttcttgagcttttttagaatgttctccacctactaaagcaaatgatttagcgcctttttcaattaattctcccgtaatttctttcgcagcttcagtaaaatcaatattaactgatgctatatgtgcatccttaccatttgttcctgatactactacaggtacagatgattgatttatcaattctttcatttcttcagtaattgtaccaccaaggaaaataataccatcaacctgtttacttaataagttattaaaaatttctttttccttttcaggatcgttatctgaatttgaaataattgagtgatatttatacattgttgcaatatcttcaagtccacgagcaagttgtgaataatagatattagatatatctggaatgatcacacctactgttgttgtctttttactagctaaacctctagcaacagcatttggacgataattcaaacgcttaatgacttcgttaactttatttttagtttctgctttaacattttggttcccattaacaacacgcgacactgtggccatagagacacgcgcttctcttgctacatcatatatagtaactgtcataatttcctccttgtaaacgttttattcattataataacatgttttcatttcattttcatagtttaccatattttaatttacagtaacatatttttgtttggaaaaatttagcgaaaagcttgaaataaaaacaaacgctaaatgataacgaacgatatattttaattttatataaacttttttcatttttaattgtaatgttttgagaaagccttttcaaatatcaattgcatttgttgaaaaatgttcacatttcagcaacaaatgtgtgaatctattatattttacagataattcatagttataattttaattactgctatcagtcataatctttaataattgtgaaattgaacaagtgtcgaagtattataacaatcgttaagtgcagtatacctttatttctatacaaaaaataatagccactctaaaagtaatatactcttagaatggctgtaagtttaaaattgtcgattcaaagataatattctacttcaacatgacatattagttaagtagtctatagtttccttggaatattattttaactttttagcgttatataaatcagctaaaggctttaattcatcataaaatgcttggaattcatctaaatccatttgttgacccgcatcactaagtgcaacagatggatctggatgcacctcagccataactccatcagcaccaactgctaatgctgctttcgcagttggtaacatgatatctttacgacctgtactatgcgtaacatctaccatgactggtaagtgtgtaccttgttttaaaattggtactgctgaaatatctaaagtgttacgtgtcgccttttcataagttcggattccacgttcacataaaataatgttttgattaccttgtgaagcaatgtattcagctgcataaacaaactcttcgattgtagcagataaaccacgttttaatagaataggctttttcgtacggccagcttcttttaataactcgaagttttgcatattacgtgcaccaatttggaatacgtctaaatactcatcagccacttcaaaatcatttggatttacgatttcgctgacaacatttaaatcatatttatctttaatctgtttaagtattttaagtccttcaacacctaggccttggaaatcatatggtgatgtacgtggtttaaatgcaccgccacgaataaatttttcacctttagcatgtaagtttttagcaacagcttcaacttgttcaaatgattcaactgaacatggcccaaatacaaatgatttattgccgtctccaataatgcccccattatcaaatgttacaatcgtatcttcaggtttcaacttacgtgatacatataaatgtttttcattttcagatttttgtaaatctgtagaggctttgaaaatttctttaaataattgcttaatagtattatcgttgaatggtcctttgttactatcgattaagtcgttaagcatttctttttcacgttgtggatcataaatacgtgtaccttgttttaatttttcttccccaattttttgtgctagttcaccacgtttagataataagtctaaaatttgatgattcagtgatacaatctcacttctgtatgattctaatttattactcatccttactcacctctactaattatttcaagtatattccactttaaagcaataaaatataatgttaaaaaatattctaacaatatcatatgtatagttcaaccctaaattgacagaaaataatcaattttctaattatatgattcgagactgacatttcgattttctcagtcattattggaaagttatattctatattgatatttattagcaaatgttaatcaattaaataagtgtcattattatagcttattttgagtcaacattactgcttttaagaaaaattttcgtttctatcttctattataaatctaaaattctcatacattcaacctaacgcttaataaaaattaacaacctttgtctttgtatattaatataaatctatagtgaacatcactcaccaacacattcagctatatttaaattagtgaacgtcattgtaccttctaaaattcattgtttatttgattatcgaatatttttccatcttcagcttaaaatgtgcaatatcactattgttatctaacgatgtttcaaacaacataaatacatgaaatgatcgcattgcctttcaaaataaactgatgatatcaaaaaaggtaagcacctgaatgcctaccttttattttgaaattcaatttttaaaaatatattacatagcttactgctatgattgattattcaacgattttagtaatcttagtcattgaatgtacgtttctctattttacttttagctttctcaactttagcatttggcgtttttgatgcattggatgatttagcatttgttgtttttgaattcttattactagtttgattattcttttgagttgacttacttgaactactttgtttctttgcaccttgtgatgatttcttattatgttgctttttctgacctgaagttttatttgtagatgcttttgatgcatttcgtttatttgaaggtgttgtttttttagattgtttacctgatttcttgtcaacagctgtattattagttgttttttcatcagctttacgtgtaataacaccattttcaaatttagcttctttttgtttaacagtgtctttattatctatattaaccgtctctgtctctgatacatcattctttttagtaactaattgaggaatttctttcaagtcatttttagcaactggtttttctgcaaataacgcttcagttaattgactctcttttgaacctggtgttaatttagcttgcttctgttttgcagcgtttgctaatctttcagcttgtgactctggttttgatacttctacctttgctgcacttgcatctttagttaatgtgtcactgtctttctctgcttgtgcttcttttttagcttcttgaacctcttgtgcctcttgtgatatatcacttaaattatttgcacttgcttcttcttttatcgctgcttgttgtgctttcaatgccactgcttttggttcttcatttgatacagctgcacttttatctgtttctgcttgtgcttcttttttagcttcttgaatctcttgtgcctcttgtgatgtatcactcaaattatttgcacttgcttcttcttttatcgctgcttgttgtgctttcaatgccactgcttttgattctttatttgatacagccacacttttatccgcttctgcttgtgcttctcttttagcttcttgaatctcttgtgcttcttgtgatgtatcacttaaattatttgcacttgcttcttcttttatcgctgcttgttgtgcctttaatgccgcttgctcatttttagatttgtttaaaaatccttcaacacgttcttttgtataggcaaccgtttcttcaagttgcgtttttctttcttcaaacttttgcgacagttcttgttctttgacttttaaatcatctgctttttgataaactttatttttaaaatacaaacctaaagctgaaccaacaagcgcgccagttataaaactaacaacaaaatctttacggtttggtagtggttcattttgataagtgtgtttattttttaatgttcttttatcattttgttgctgcgtcatttgtatatcctcctataacaaatgcacttaaataagtaacaacctcatttaagtgcatttgtttaattattaattatttatctactctagaagtatagctatgatttgcatcagttgctacattattagctttgtaatttgcacttccacgacggtagtgtctattttgccatttgtctgcaatttccattgcaacatttgaccattgaacaacttgtgagattttatcttcattttgagaaatattatgtgtaattgaatttgttacacgatctacagagctgtttaacgtttgtactgagtcaccgatacctttaacagcatctacaactgagtttaaacgatctactttaccttggatatcctcagttaaacggtttactttatgaagtaaatctgttgtttcacgagtaataccttgaacttgaccttctacaccgtcaagtgtttttgcaacataatctaagtttttcttaacagaatttaatacagctacgataccgatacataaaattaagaatgcaatcgcagcgataattccagcaattggtaaaatccaatccattaaaaacgcctcctaattaacatgtaataatgtcattaataataaatacccatactactctattataaacatattaaaacgcatttttcatgcctaatttatctaaatatgcattttgtaatttttgaatatcacctgcacccataaataaaataacagcattatcaaattgttctaatacattaatagaatcttcattaattaacgatgcaccttcaattttatcaattaaatcttgtatcgttaatgcgccagtattttctctaattgatccaaaaatttcacataagaatacacgatctgctttacttaaactttctgcaaattcatttaaaaatgcctgtgttctagagaaagtgtgtggttgaaatactgcaacaacttctttatgtggatatttctttcgtgctgtttcaattgtagcactaatttctcttggatggtgtgcataatcatctacaataacttgatttgcaattgtagtttcattgaaacgacgtttaacaccaccaaacgtttctaatgcttctttaatatttgtaacatctagcttctctaaataactaatcgcaattacagctaatgcatttaaaactgtatggtcaccatattgtggagacaggaagtgatcataaaactcaccatccacatacacatcaaaagcagtacctttatccgtaatttgaatattttgagcataaatgtcatccgaatctttaaatccataataataaattggaacatctgcttcaattttacgtagatgttcatcatcaccccaagcaataataccttttttaacattatgtgccatttcttggaatgcatcaaaaacatcattaatatctttaaaataatcaggatgatcgaaatcaatatttgtcataattgcgtaatcaggtttataacttaaaaagtgacgtctatattcacatgcctcaaaagcgaaataatcactttcaggcaatcccatacctgtgccatcaccaattaaaaatgaagtctttttatcaccattcataacatgtgataataaacctgttgtagaagttttaccatgtgcaccagttacagctactgaagtatattgatcaataatctgtcctaaaaaatcattataacttacaacatctaatttcaattgatgtgcacgtactatttcttcatggctactcgcgaatgcattaccttgtataactaccatatcttcttttatgttattagcatcaaatggtaatatttttatccccttatttctaagagcaacttctgtaaatacgtagttctcaatatccgatccttgaacttcatgtcctaaatcatgcatgatttgtgctaatgaactcatgccagaacctttaattccgacaaaatgatagtgtgtcattatataaaactccttactcataattattctttatttaaatctgcttccgtaacataaacatcccttggttttgaaccattagcactcgaaacataaccgagttgctctaattgatcgataattcttgctgctctattatagccaatttggaaatgtctttggattaatgatgttgaaatatgtccttcattaaccataaatgcacaaacatcatcaaataattcatcttgtgattgtgtttgtgtttttttcaacaattctttttcttcaaatagatagtccggttctctttgttgtttgataaaatcaacaacatcatcaatttcgtcatcagaaacaaatgtaccttgaactctaatcggtttattcataccgctaccaagatataacatatcgccatatcctaacaagcgttctgctccaccactgtctaatatcgttctcgaatctacacttgatgataccataaatgcaattcttgttggtatgttggctttaattaaacctgtaattacattgacagatggtctttgcgtagctactaacatatgaataccacatgctctcgctttttgagcaattctagcaatagactgttcaacttcttgcggagccatcatcattaaatcagccaactcatcaattacaatgacaatttttggcattctttcatcatatggtgcttttttgttaaatgctgttatattacgtacatggtaatgtgcaaataacttataacgtcgttccatttcttctacggcccattttaaactctgtgtagctgctttgacatctgtaattaccggtgcaactaaatgtggcaaaccattataaggagctaattcaaccatttttggatcgataagtaataatcttaattcctcaggatgatttttatatagtaaagacatcaaaatactattgatacaaactgatttccctgatccagttgcacctgcaattagtgcgtgtggcgttttagcaatatccataagtaatggttcattattaattctataccccatcgcaactgttaatttagattcagcatttttaaaacttggagattcaataatagaacgtaagttgactgtcgttggattttggttcggaacttcaataccaacacgactagttcctggaataggcgcttctatacgaatatctttcgctgccaatgccattttaatgtcatcttgtaatgccgtaattcttgaaactttaacacctttttcaactgataattcaaatcttgtaacacttggaccttcagttacatcttgtacttctgcaggtacattaaagtaaaataatgcgtcattcagttctttctttttatctgtaatccagtcctcgtccgactcaataacttgtggttcttctagtaatgaaacacttggcaatttaatatttgggcctttacgaatcatcggcttagatgtttgtacagcttgatttgttgcaacatcttgttggttcgtccgaggtctattttcattagctgtatcttcatttttatttgaaaatgatgactgtaaatctttttgttgatcatcattatcttgttgtccactagtattgtttggatgtgttgtttcttcgctttcttcagttatgtcgcttacttctgaaactgaagacgaagttgattgatcaacttgctcattttccaattgattatcatcttgactttcttcaaatatttccgtttgagttgaatcaacagaaggtttctgctctgaatattgttgtgcattttgataatcattttctgtttctgcatgaccaataagttgattgttctcaacattgtttgatgtcatattatttgttttatatgcatttgtatttgactcttgtgaatcagatcttgatgatggtgtggcttgactcgcaggcattctttcactcacagcttgcttactttgtacaggctttaattcaggcacattgacttttgaatgctttttacgatccatcatacgctttttatcagatggcgtcatgacaacattaaatggtcttttacttaaagttgaaaccttttcagtctgtttctttggatttacgttttcaatagttttctcttcgacattttgttcactttcagctgcttcgttttgcacattttctgtaatttctgcgttattcttttctatttcattcatgcttgaatcttccacaacatgattatcattcacatcattcgttttcaatgagttgacacttaagtttgtttggtcatcttttttatgacgcggtgctaattcaatttcattatcaaccgttttatcgatattatttacttgagattcagttactgcgtactcttgcgttttaggagcgtctacatgcatttcagacgcgtttctattggtattatcttcgatatttgaagtagtatcctcatctacttctgtatcatttaattcataaaattctgcatcatcgatttgacttcctgaatattcttctttattcgttgctccatcttcttctgaatcagcaattaatctggattgattttttagttcatctttatcatttacttcaacgttatgttgtagtgctgattgatgttgagacgttacattcgaaaccgtaacttcatcatctgacaattgttttgttgtcgatacttgattcaaactaacttcctcataattgtatggactttcatctacatgagtgtcattagtgtcttcattttgtattgacgcttgtttattttcatcatttgatacagtttcattctctatgccatttgtatgaagctgactagcatctgtactattatctgttaagtcactatcatcatttaatgaactatcaccaacatagcgttccgcttgtttagcatacatttcatcaattgcacgttgtattgcatcttgctcttcgtttttatgttcttcacgcttttgttgcaacgcttttttaaatcgacgcttttgaagcactttacgttctcgttcacgtctaatttcttcaacaatttgtgaagcataaatattttcaattttgatagtattatcaacttttgaataattaggcattgattttgttgttgatgatacattttcatcagatgatttagatgcagttccttgtttgacaacactatcattttgtttttcttgttctaattgtttattttgagacgtttgcgtcttagctacatatttatcatatttttgtttatctgactcaactttttctgaaggtttacttacagggatacgaccattttctaactttttaggtttcattgtgccaaaaatagctgacggtacctctgaagtcttgaaactttctttgtgataatctggagttgaatctttagcacgatgatttgtattattagaatacatattatgtgtttttggcttgtgcgtttccttctcaataccattaattgcagaaacatatgtacctggcttattcgtatggtaatgtgaatgatctttatattttatactttgctgtgatattttagaattcccacgtttttcactataattttgttcttcagttgtttgatttcttctacggcgatgtcgtttttgtgaacgagaatcgtggctttgtttgcgatagtctcgatggtattgttctttttcatctgaaatagtatctgcagattgttcaacattttcattttcataagctacgctcataggaaaacggaattttcccctcggacgactataaatatcattattttgaggcagtaatgagtcatgatcgttatctatattttgtgattcttgacgtctttttttctttctatgaatcaagtcatcatttgaatcattatcttcgccgaataatttatcaaaccagctcatattttcactaccttccttaattattcaaaaaatgcttgtccaatttcatagctgtcatttaataccataatacctttttcttcaggtgcattaggtaaattcaattctttcattgaacaaatcataccgcttgaggcaacaccacgtaattcagcatctttaattaccataccgctaggcatcactgcacctactttagcaacaacaactttctgtccagcttcaacgttaggcgcgccacatacaatttgtaatgtgtcatttccaacgtttacatttagtacacttaatttatctgcatcaggatgtttgtctttagtttcaacgtagccaactacaaatttcggtgatagatcagcatttaatttataatcaaaaccagcttctgaaatacgcttttggaatacatttacaagttcatcagttaatttaatatgacctttttcttcaattgttatatcttttgaaatttcaaaaatattataacctacaacattaccttcattagtaatttcaacaacattaccttttttattgtagtttaattcaccttcaactggttcaatttgtaaaaatgcgacatctcctacatatttaggattgtaaaataaattcattatgacaaaactccttatccaattatttctatttatctttattaaatttacgacgatttgcttctaaacgctgaatcacgtttggatctcttttttgtttattatttttacctaaaataaatatcggttcaagatgaccctgtttatatccaaaggataatgatgtaattggaactagacctttagtgaaaaattccattgttaaatgtgccatcacatcatatcctgttttattgcgtatatctgcaataattaacacatcttggtgtggcactgctacgagcatttcgccttgacattgtgcctcaatttcatttaaaaatgcagtatttagtatcctacttgcatcatacccgtcatttgagttaataaaataaaaaatattaccttttacttcatcagtcgtatatgaatttgacaattttctaacattaaacagagacatttctcttatttgttgttcagttaacttcaaatcctctaacatgctttcgtcaattagacgatatgatttccctaaatcgactgcataataaactgctgtttctgcagtatgctcatcatagataaaaggaacaccttgtttagtttttttatcaaagctagtcgctctaatgacaggcataatttgactagatgatatactctcaagggttttatctgccatttgtgcaatagcttcatcaacgtaataaacaatttcatctacaattttttcttttttatcttcatattttgcgactatagcgttaagtttaatcgtgatacctttgttattatctgttcgataaatacgcaaagtttcttcttcacgattaaatttaaaatcaacgtctaaatggcttaaacgttcctttaatttatctctcatttgaaaggtattcatatgtaacactcctaatttcgcaccttataatagtttacaataaatcaacacatagtaacagagaaaaacgagtattaccccgtttttctctagtctaaattacacgtattgagctaaaaatgcatctatctgttcaattgattttcgttcttttccaatataacttccaagcagttctccatttttatatactagaaaacttggaatacccataataccattttcaatacaaatatccataaatttatcacggtctactgatacgaagtcaaacataggatatctcgcttctaattccggtaaatctggttctatcactctacaatctggacaccagcctgcagtgaattcaaatactgtagcaccttgttttaaagattcaaattgttgttctgattcaagttgtttcatttttatgtctccttaattaatgattatatataactatttagagataatagttgttattacccgattatttatattgtaatgtttctatttgattattatctaaattacaaatggcttctgaaagtaaagatctagctgcaaaatagtctcttatatcaaatactgagtctgtactatgaatatatcgtgcacatacaccaataactgcagtcggaataccaatattagctttatgaatttctccaccatctgttccacctggtgacatatagtattgatgttcaatgtcatgtgcttctactaactttaataaatagtctctaaatacaggctttaaaatcattgtaccgtcttttatgcgaattaacgtccctttaccaagttcaccagataatggttggtttcctttaacgtcattggcaggtgaacaatcaactacaaatgcaacgtctgggtctatcatctctgcagatgctttcgcacctcgtaatccaacctcttcttgaacatttgcgccaacatacaagtctacatctaattctatatcttttaataattctagtatttcaattgccaagacacaaccataacgattatcccatgctttagcactatatcgatgttcagataactgtgtgaatggcgtgtgaggtacaattgtatctcctatatctattccgcgctcacgcacctcatcttcattttgagcacctatatctaatgttaaatctttaatttccggtgcaccttcactaccagtacgaaaatgtttaggtatattagaaacaacaccgataattttatcgccatttctatttttaattactaagcgttgtccttgccaaatatcatttgcaacaccacctaaatttgtgaattgaatcattccatttttagtgatatttgtaatcataaatccgatttcatccatatgtgctgcaatcattacacgttttgcatttggatttttagattttttcacaccaaaaaatccacccatacgattttcaataaattcatctacgtacggcgccatttgctgagtcatataattttttacttcttcttcaaaacctggtgccccatgaagctcagttaaagtttgaattcgttgtaatgttacttttttatttatgttcataaaagttctcactccttataagttattatatcatcttcaatatggtaaactaatgatatgaatttgaaatcaagggagcataaatgatgactaaactgaaatatataattccaacaataattgcagtagccattgtaattatttctaccatttcaatcatccaatttattaatcgtaaacgctataatcccgttaaagtacttaatgaagtaaaatcatattttatgaatgtcaaaggctcatatatcgtttatgaaccattcgttcatcctgaaactgataaataccgtttagtttatcaaggtggaattacaactattaaaaatggtcaaaatattcattatgatttttatgcagatgcatatactggtgaagtcattaacattgtagagcgttaatacgaattttatccatatttgatttggatcgtaaaacttaaaaatgagccacaccctaattagtaagattggatgtggctcaattttttatttttgaaaatttgtttagtaatacatctttattttagttattatcaactaatgtttcacgtaaaatatatgcatctatgttttcaccattatcgctgtattttacagcaaagtagttttcatcatgataaaacaagaaccaatattgttgctgaataaaatatggtatcatgcgttctttttcacgaatcgattgcataggataatcatcatatgccgttacccatagaggatttttatgtgcagtagttgggaatatatcacccatatgaactgctttatctccttgactttcaatcgtaataatcgtgtggccaaagctatgacctccactatgttgcatcttgatacccagaaccggttcaaaatgtttttcgaataaaatcaacttgttactataatcgcctttattcttatcccagtaagttgatttacttcttatattaggtgcaataaactcatgccactcatcttgttgcacaacatgaatcgcattttcaaaaattgcatgtcctgcttgatcagtcaaaccggcagcatgatcaaaatgcatatgtgtcattagcacataatcaatatcctttggcgttaaattataatttgccaaatcagcaattatatgactttcttcatctactccaaaattacgtaattgcttttcagataatttaccattaccaatacctgcatctataatcaaattatattgagccgtttgaatcaaaattggatgtgtcggtaaattgatttgatttcgttcatttgcattgtattgctttgaccacaacggcttcggaacaacaccaaacattgcaccgccatccatttttgtattgccaccatttagataatgaatagatatatccccgattttcataacatcacctattctttctgtattcgttattacaattagcatgtgtttattacatcatatcactattcataaatgcgaacaaaaacgaaacgccccacactaatacacttctaactacttataaagattaatgcaatcatattatatgtaaatgcatcataaccatcggcctgtatttttaaattaataattaaaatttacaagtaaaatgcaagctttattcttttaaatcaaaggtatttagtataacattgttcataggcgcattatctcctttagttatttgtttagtcacttttaattatagagataattgcgctttttttatattcaaaatcaaaaaatcggacagatgaaaagttaaaaactttttccatcagtccgatttattatagaacctttatctatagaaccattatagtacgaaaaaacacttatgattgtatgtgtacataccctcataagtgctctatttttgtgaatggaatttcgcttccatacgataaatacgtgaccctttatccgaaaatttcttttcatattctgttaaaatattactgccatcgtcttcttgatgtaaatttagatttatttttgtaaaatacattccaaattgagacatactttctaaactgtaggcaaatagtcctctgttatcagttttaaaatgtaaatctccttcatcatttaagatttgttgatacaacgctaaaaacgtatgatacgttaaacgtcgttttgcatgacgattttttggccatggatctgaaaagttcaaataaatacgcgaaacttcgccgtctttaaaatattcatttaattcaatggcgtcattacaaataatctttaaatttgttaaacccatctctttaactttatccaatactttataaacgatacttttctcacgttccattgaaatatagttaatatgaggattttgagcagctaatgttgtaataaactgccccatacccgaaccaatttcaatgtgtatcggttgcgttttatcaaaccattcagtcattttccctgcatgttgaccgtccatgtcaaccaattcaggatgatcttttaaataatcttcagcccatggtttgtatcgaactctcatattttattctcctcttaaataaacatgttactattcataacttcatttaggaatttaagccaagtgttcatatccttatatcttttttgctcttcataccattgaacaagacctatagattgaattaccgtataccatttcatacgtttatttaaattcaagctctcttgaacaccatatgtttcaagccattcagaccattgttgttgtggaacatagttgtaaagcagcattccgatatcaattgccgggtctgcaatcattgcaccttcccaatcaactaaaaatagttcatctcgatcggataataaccaattattatgattcacatcaccatgtacaacagtgaaaaaacgcgaatctaaactcggtatatgctcttctaaataggttaatgattttctcacaatatgatgtgttaaaacttctcttgataaagaggcattaattttattaagcataatctcaggagtaataggttccatttccatacgctttaacatacttaataaaggtctagaattgtgtatcttctttaataaatgtgcaactcttgtttgcttcatttcgtttgaagatagttcacgcccatttttccaatgttgtgctgtaacaacctcgcctgtttctatgcgtttcgtccatactaatttgggcacaataccttctgctgataatgccgcaataaatggatttgaatttcgttttaaaaacaacttttgtccatcttgttcagccatatatgcttcaccagatgcaccacctgctgaatcaagtgtccaccctaattgataaaactgctccaactcgtccacctcactttcaattagaaaatggctctagaaataggtttttcaagagccatatattctaatttataacaccatactggtacaaatattatgtccagataattattgtaaatcctcaaccaatgcctacattacacgactaaatttaaatcgtaatgtctgtcattgacaccatacattctatagtcacttacttgacatataatgttaccgtgtctaaaactacatgtttttgaatctctgtaggcgataaactctagttttcaaaataattgctatcccattttcatggttagcataaatttatgaactgtaacatttacgtacttagtaaaatatgatgcacatcatatttgtaactcatagaaaattttataatttttatcattatatttcaactgaaaatgagaaacaaaatggcactttttactaatatgtgttttctaaacaacacttttaagcttcgttttaaattataacataattcacttacgaaagttgataaatttaagtaatttaatctaaaaatatgatgaaagaattttaaatactgtgtgactctatatacttttcaaatccttcttgtagttgacgtgtaattgggccaactttaccatcattaactggttcaccatctaatttaataacaggtgtaacctcagctgaagtacttgaaacaataacttcatctgcgtttttcaagaaatctacagtaaacgtttcttctttaaatgggatgttatagtcttcggcaatttttttaattacaattcgtgtaataccattaagaatatagttgttaatcggatgtgtataaatcacaccgtctttaattgcataagcattacttgaagatccttcagttacagtttcacctcgatgttgaattgcttcaactgcattatatttcacagcatattcttttgctaatacatttcctaataagttcaagcttttaatgtcgcaacgtaaccatcggatatcttcaacggtaacaccattcacaccattttctaaatgatcataaggacgatcataactctttgtataagcaacaattgctggttctacttcaggtgtcgggaagctatgattcctttcagctacaccacgcgttgcttgaatataaattgccccagtttcaatttgattcatatcaactaatttacgagatagttcaattaattcttctacagaataatttaaatctaaaccaatctcattggcactacgtaaaaatctttcataatgttctgttactgtaaataacttaccattatatactcgaatgtattcataaataccatcgccaaatacgtatcctctgtcgttgtatgaaacctttgcttcacttggacttacaaactcaccatttaaaaaaattttttccatatattattcctccacgcataatgaataaattgcttctaagtaaatactagttgcgttaaataactgttttttagtgatatattcatttttctgatgcattaaatcttcagaatcactaaacattgcgccaaatgctacacccttgtctaagtttctcgcataagtaccgccacctatagtataaggttcagtcatatcatttgtttgatttctatatgcagtaactaacttttgtacaaaaggatcatttttatcaacataatgtggtggttggactttacctaatttcacttcaaagccatattgttgaatctcatttgcaaaacgatccatagctttttcaaattcaaatccttctgggtagcgtaagttgataccgaaaagacctgcgttttcattatcatatgtaataacaccaatgttagttgtcacgtcacccatgacatctgtatggaatttcattcccatcttttcaccaaaatctgaattaaataagtagcgattactaaatgctacaaacgcttgtgcattattatcaagatttaatgatgctaagaattttagtaagtaaagacccgcattcacaccgatagatggatccataccatgaaccgctttaccttcaactgttaaaactagaatgccactatcaacagtactatcaccttgtaaatgattttgttctaaaaagtactcaaagtcttgaataacatctgtcatattttctttaacaagcactcttgcttctgcatgatcaggtaccatgttgtaacgttcaccagatttaaaagttattaattcataatcaggttcatcttgatcttcagtaagtttattttgaactaaatcaaatgttgtaatgcctttttcaccatgaatacatggaaattctgcatctggtgcaaaacctaatgttggcatttcttctgttttaaaatagcgatccgtacatttccaatcagattcttcatccgtaccaataatcatatgaatacgtttcttccaatccacattcatatcttctaatatcttaattgcataataagcagcaattgttggacctttgtcatcaagtgtacctctagctatgatagcatcttctgttacaaccggctcgaacggattactatcccatccatcaccagcaggaacaacgtcaacatgacataagatacctaatacgtcatttcctttacctgcctcaattcttcctgcaatatgatccacatcatgtgttgtaaatccatctctatgtgcaatttcatacatgtagtctaatgccttacgaggacctggaccaactggtgcgtcttctgatgcttttgcatcatctctcacactttcaattgctaataatccttttaagtcattaatgatttgatcttcgtattgttgaactttttctttccacattcgaaatcgacttccttttttctataagttaaattctattttacatgaaaagatataaaaactacaataagatgtcagaaaataataaaaaggaacaaaacgatgctattgatatgacacaaatcataaatagctgctttgttccttttttaatttatatatttaaaatacacatattcaagagctcgagatataagtcaatgtactaggcacacaatttaatattgacagtaattaaccgaacgaaaatgcgccccggggccccaacatagagaatttcgaaaagaaattctacagacaatgcaagttggcggggccccaacatagaagctggccaatagttagctttcaataatgtgcaagttggggtaagggccccaacacagaagctggccaatagtcagctttcaataatgtgcaagttggggtaagggccccaacacagagaatttcgaaaagataaagaaatacgttttctttagatattagtatttcttatgaatgagtttcacgcatgtattcttctttctatatgcatattagctatgactaacgataaagaacctgaaacactaataaatgtcctatagtttacaatattatattggcagtagttgactgaatgaaaatacgcttgtaacaagcttttttcaattctagtcaaccttgccggggtgggacgacgaaataaattttgctaaaatatgatttctgtcccactcccttatcatttctgtcctactcacatcttattctttatcagataatgcatttttattcttttttaaatcttcttcagtgacgatacgtaaattattatttggtgctgcgccaccttcatcatcaaatttacctttttcaatactttcgtcagtcttattgtcatattcggtaaattttgatttttcttctttgaaaaatgcttttggattattttttaatctattagcatattctttcggatttgtttttacttctttaattgtttcattagcaattgttcctaattgcgtcgctttatccttagcattatctttatagctttgaggatcttgtttatatttattatattctgctttcagcttgtcacgactatctttacgtgtaacaagtacagctgctacagcgccacctatacctaaaatcgctttaaataaattaccttttgccatatcaatcgtctcccttttatttataatttaatttgtcaaaatcattttcagttaataaacgatattctcctgaatctaaattgctgtccaattctaaatcagcaattttgatacgtcttaaatgtaatacctcattttgaatgctatgaaacattcgtttaacttgatgatattttccttcataaattgttacgtgtgacgtttgattatcaatataagttaatattgcaggcttaaccttgccatcagtcagtgttacaccctctttaaaagcttgaatgtcgtcttcagtgataggatttgctgaaataacttcatattttttagaaacatgtttgtttggactcattaattcatgattaaaatcaccatcattcgttatcaataaaagcccttctgtatctttatcaagacgaccaaccggaaaaatatttagatgttggtattcaggtattaaatcaataacggtttttgaatgatgatcttcagttgctgatatataaccttttggcttatttaacataatatagacattttcaatgtattctattaattctccacgaactgttatcttatcgttttctggttctatatgtgtttttggtgatttaattacttgttcgttgacatttacaaggccttttttaagtaactgtttgacctcattacgtgtaccgacgcccatatttgctaaaaatttatctattctcatcgtaaaaacctaactctacgtcttaatttttcaggaatttcacctaagaattcgtccgcaagacgcgttttaattgtgattgtaccgtaaattagaatacctactgtaacacctaaaataataatgattaagtaaccaagtttagtaggttctaagaatagatttgcaaggaaaaatactaattctacacctagcatcataataaatgaatacaagaatatttttgcaaaatgaatccaactatagctgaatttaaacttcgcatattttttaagaatatagaaattacatccaattgcaaataataatgcgatactagtacttaaaattgcaccaggtgtatggaataacataattaatggatagtttaacgctaacttgataactacagaagctaaaataacataaactgttaatttctgtttatctataccttgtaacattgatgccgttacacttaatagtgaaattagtattgctacaggcgcataatagaataataagcgactaccatcatggttagggtcatgacctaaaacaattggatcgtaaccatagaaaactgtgaataatggttgtgccaaggccataattccaatactagctggaacagttataaacattaatacaccaatagatgttctaatttgatgatgcatttcatgtaagcgaccttctgcaaatgtttttgtaatataaggaattaaactcactgcaaaaccagcacttaatgatgtcggaatcattacaattttattagttgacatatttagcatattaaagaatatatcttgtaactgtgaaggtataccaactaaagataaagcaccgttatgtgtaaattgatctactaagttaaataatggataattcaaacttacaataacgaacggtatactataagcaataatttctttatacatcttgccatatgacacatctatatctgtgtaatcagattcgaccatacgatcaatattatgcttacgctttctccagtaataccagagtgtgaatataccaataatcgcaccaactgctgctgcaaaagtagcaataccattggctaataaaatagagccatcaaagacatttagtactaaataacttccgattaatatgaaaatcacgcgtgcaatttgctcagttacttctgacactgctgttggccccatagatttataaccttggaatatccctctccatgtcgctaatacaggaataaagataacaaccatactaatgattcttataatccaagtaatatcatcgactgaccaaccgtttttatcatgaatgtttctagctaatgttaattcagaaatataaggtgctaagaaatacagtaccaagaaacctaaaacaccggtaatactcattacaataaaactcgatttataaaatttctgacttactttatatgccccaatagcattatatttcgcaacatatttcgaagctgctaatggtacacctgctgtcgcaactgcaattgcaatattatatggtgcataagcgtatgtgaacggcgccatattttcttgtccaccaattaaatagttgaatggaatgataaaaagtacgcccaataccttggtaattaatatactaatggtaattaaaaaggttccacgcaccatttctttactttcactcattacgaatctccctatctcatgtttattaaagttttgtaaactaaaagctgtttctctgtaaaatcatttttcattattatgaatatatcacaaaactttatttcattgtcgtatattcaatgaattatcataacaaaattatcaacacattgtcattgaatactagattttgattagaatattacgaaatttcatataaacattatactactatttgagatgaacatcgcataacagtagaaaaatcattcttatcatacacatacatcttcattttttatgaagttcacattataaatatattcaacataattgtcatctcataacacaagagatatagcaaagtttaaaaaagtactataaaatagcaattgaatgtccagtaacaaatttggaggaagcgtatatgtatcaaacaattattatcggaggcggacctagcggcttaatggcggcagtagctgcaagcgaacaaagtagcagtgtgttactcattgaaaaaaagaaaggtctaggtcgtaaactcaaaatatctggtggcggtagatgtaacgtaactaatcgattaccatatgctgaaattattaagaacattcctggaaatgggaaatttttatatagtcccttttcaatttttgataatgaatccatcatagatttttttgagtctaggggtgttaaattaaaagaagaagatcacgggcgtatgtttccagtttccaacaaagcacaagacgtggttgatacattagtgacaactatcgaacgccaacatgtaacgattaaagaagaagaagctgttagtagaatcgaagttaatacagaccaaactttcactgtacatactcaaaataatagttatgaaagccattcgctagtgattgctacaggtggtacaagtgtccctcaaactggttcaactggtgatggttataagttcgcacaagatttaggtcataccattactgagttattcccgaccgaagttccaattacatcagctgaacctttcatcaaatccaatcgtctaaaaggtttaagtttaaaagatgttgaattgtcagtacttaagaaaaatggtaaaaaacacatcagtcatcaaatggatatgttatttactcattttggtatcagtggtccagctgcattaagatgtagtcagtttgtttataaagaacaaaaaaatcaaaagacacagcacatttctatggcaatcgatgcatttcctgaattaaaccatgaacaattaaaacaacacatcacatcattattatcggacacaccagataaaatcattaaaaacagtttgcatggtctaattgaagagcgctacttactgttcatgctggaacaagcaggaatcgatgaaaataccacatcacatcacttatcaaatcaacaattgaacgacttagtaaatatgtttaaagggtttgtatttaaggtgaacgggacattacctatagataaggcatttgtcacaggtggtggtgtgtcacttaaagaaattcaacctaaaacaatgatgtctaaattagttccgggattatttttatgtggtgaagtattagatatacatggttatactggtggttataatattacaagtgcactcgtaacaggacatgtcgctggattatatgccggacattactcacatgcatcaatggaataatagtataaaatttggttcgattctctttagtagatcaactttttcattcaaataaaaatgaccttaatataactgagtcactaaaaagtgtcgttatattaaggtcatttcgttaattatgattctttttcgtttttagtacgtcttctagctaacaaagccgcacctgtaatcagtgcaaattctttcaatggtaaatccattccttcagaacctgtatttggaagttctttttcaactttgcgcgattcatgtgtctcttcttttttaataggcgtacaaacttttggagctggctgaatttcttttggtgatactttcgtcgcttcagctggtaatttaattgctaaaatttcatcaacaatgaattgcgtgtgttgtttgatgtcatttaatgtcgcatcttcatcaatcattctattgccatctgcaacatattgatcaattaatacttttactttagctaattgttctggtgttgcgatcgctttgaatttcgcatatgtttgttgagcaatgttatcaattcgcagtaagctattttctttttcagtaattactgcttctatatcgcttaatgcaacattaaatcgttttaaaactgcatcaacatcagcattagtgcgtgctgtttttaattcttcatccatttgtaattttaaagcagttatagcttttaatgcatcagccttattacgattacttacttttcgataattttgcactaaagcagtgacgcgtgcaagatcatcattaatcgttttttcagcatctggctttttaataggatgtacatctaaatcatgtattgtttgtagatttaatgatgctgttttatcaacttgtgcattgctacgatcttgatcaatttgtccaatagcagtgtcataaatattttgtaactgtgctaatatactatttctttcttctaccgttgcttgaatattcgcttcaattgcttgttttttatcgttgaataatgttgtcaattgttctcgagcagacgcctttctgttaataacaggttcgatttcacgaatttcgtttttctcatcatgcaataaatatgccacatctgcattagtcactgcactagcaatttgttgtttagctttaattaactctttttcaacttgtgctattgcaatattttgttcttcatctgtcgcttcgttatttgctttaattaaattaattttatttgtagcgatattttgaatttgttgtaatgctgttgctttaactgttgtcgctggtttaatttttgaaataatattttgagcatttatactatcttgattaacttgggcagtcttatctgcatgattgatctgatcaatagcctgattaagtgcttgttctactaaatgtttagcagctagtctttcttcttcagttgataaatcgctttgatcgattagtgcattttgagcttcggcttttacaccaacagattgacgcgctgctggtttaacttgaactttaggtaaaatcactttgatgttgtcgttgccatcagtctcagttcgatccacttctgcattcgttttgttttgtgcaatgtcatttttaattgtatttacaattttatttaaagtatcaatagcaacatctctttcatcttgagtagtatccaacgtatttcggattgcatcgagttgatttttattattttcttcaatgctatcaagcgcagctcgtttacgtcttactttaggttttatttgctctattgccttgattgtttgatttctaacatcagtaacagcagcatcttgatttgtattttctatttcttgttgcgcttgtttgagtgtgtcgctaattaattgattcgcttcatctaattcatcaactgttgcatgtggtgtatcttttattgattctacttgattttctgcacttgcttttattgcttgttgtgcttcaggcttaattacaatatgaggttgtacaccttttagtgtagcaatgccatttgtttcaacacgtttcacatcattattcgctattgcttgatcgatgttttgtaatgcacgtttttcattattcgctaattgatttaaagcaacttgtttttcttcatcagtcgcatgttccgcttgctcaatttcgcgctttttagcttcatattgttgcttaactgcatctctagcagctgctctaacaatatggtcaggcgtcactaaagcaatgctatcaagcgcttgacttgttgtatcatcaacttgttgatttgttctattattcgtaatatctgtcatggcttgatttacaaattcattgattttatctagtgctacttgtctttcttctgctgttgcttctttatcctgattaatcttagcacgtaattcattcgctttttgattgattttttcacgtgcagctggtttaacttttgtttcaggttgaataattttaatcgctgatacaccatttgttgctgcttgattcacctgactattcgtttgagcttggtcaatagctgcaagtgctttttctttttctttagctaatgcttgtgaagcaacttctttctcattatctgttgaatcaagactattatcaatttgctgttgcttttctttaacagctttttcaatatctgcaattgcctttggtttaattactacttcagcttcaacattatctatagcatttaccgcttgatttgtagttgtgtctacctgatcatttgtttggttttgattaatttgattaattgcttgatctttaagttgattgatttgattaacagcagcctgcttttcttcgtcagttgcattaggtgtttgtttaaccgcttcaatacgcttcgccacttcagcagtgattttatctcgcgctgcttgtttttttactacatcaacttgaacagcatcgatattattctctgctactgtcgcagcttggtctacttctgcatttgtgttagcttgtttaatactttcaatagcttgttgtctgtcttgatttaaagtattgatcgcagcatttttctcatcattcgttgcatctggtgtagcattgatttcagctaatttagcattataatgctgattgatttgtgctaatgctgcaggttttttaacaatatttggctgaatcgcattaattgcttttgtacctaattgttgcgcttgatctacttccgcatttgtatcagcttgatttatattattaattgccgttgctaactcttgatccacttgatttaaagccacttgcttttcttcagttgttgcatttgtgttttgattaatttcttgctttttagcagttgctaaatcatttaatacacctgtagcagtttgtttcttcgttacatgcggttgaactgcgccgatttgattgactgcatcgtctctaatactattgaccatcgcagtagtagacgtcacaccaatatcagttaatgctctatttttaagtgtattgacacgatttatcgcttcttgtttctcttctcgagtcgcgccagttgtagcattgatatttgttatcgcctctcgcgctttatcatttacaacattgcgagtatccgttttaacttgtgttgccggttgaatcactactatattttgtgtgccctgatcttttgcttgtgcaacttcttgattcgtatctgctgcattaatattttgcttcgctgtggctacagcttgatcaagtaattgttgtgctgcttgttgttcttcgagcgtcgcatcattattattaaatatcgtattatgttgcgtttccgcacttttatcgatggcattttttgcatctgtttttacttttgtagctggtgtaattgcttgtattccttgaatcgcatttgtctttacttgttcaacatcagcattggtattagcgtttaaaatgtttgtgtttgctgcagttacagcagcattcactttgtcaattgctgcttgtctttcttcttgagtcgcatcaggattagcattgatctctgcgatatgttgttgtgcatcatgtgatacggcatcccttgcagcttgcttaacaacagttacaggagcaattggattaatggcatttagaccatctcctttggcgttatcaacatcagcatttgttgttgcttgattgatttgttctaaagcatggttggttgcttgagttaattcgttcaatgctgcatttttctcttcctgagttgcttctctattactatttatttgttgtcttttcgttgctgttgcttggttaattgcatctcttgcagcttttttatgagttacttgaggaacaactgctccaatagtattgatgccattatttttagctgtttcaacgtcagcatttgtagtagcattcgtaacattatcaatagcatctgtttcatccgtagctaattgatttagtgcatcttgaatctcgtcttcagtaacatctggtgttgcattgataatttccctttgtttcgttgctttatcacgtattgcttttttagcatttggtttaacaaccggtgttgcagtatccccacttaaggtctgtataccttgatctttgattctagtaacgccatcatcagtcgtttggtcaccaatattaccaattatttcatttttatgttcctcgataacttgtattgctgcttgtttttcttcatctgtcaattcatcattttgattaactaaatcttccatttggtcaacttttttattaactgcattttcagcatcaacacttcgaattaacgtatgttgcatttgattagttaatgaatcaatatatgcttgagaaactcttttatttaatggtacattgttacgattttcatctaaaatcgtttgtgcgcgtcgtttcagaccattaaagatatctaatgacgcaaatgtataatcagcttgttgaatacgtctgtcaacttcggcttgtaatgcatctttattcatgatgatatcgatagtatatggatttgtacttacagtatgactttctgcagctgaattaatgaaatcttgtgtatatgttttatacgttaatgtctcgttaaatgttactgttcttggtgtcggcacattatttacacgtaatttatatcttaaatcgagtattttatcaggcataagtcgtgccggagagtttgctgtacctcctccagtacttttaattgttatcacacgatttgctgcatcatatgtaacattcatatcattaacatcaacgcctgaattgttacttggaaaatctttagtcaatgaattgttcacatattcaacaccttcaggtaattgaacttgatatacaaagtcatttgtatctagagaagcaccagaattaccattattctttaatgatgttgttacagtaaactctttattatttgttgctgttggatccattgttcgtctttcaacaaaaacatgtgacccagaatgaagtccgatagagtcaacaaagctatagtatttgtaaccatcttttagttgataaatgccacgcgcatctgttattgcgtcatttttaggtacaaattgaattttgagatttctcacattatcaggtactttaaataaacgcaaagttggaccgccttcaacagtcttttcagcaatcgtatcattagtatcagcatttttgataataacatttgttgcgccttgaccgtttttagtagtcattgtattaaattcaaagattaattcagaattcggatttactgttaatgctttctcgataccattaaaatcgccatggtcattcgtatcagttccatgtatacgacctaatgcaattacatttccttgtgcttgatagttcttattatctcctgaatcaaacatgctcgttcttaccattgcatgactaaacacccctactttgccaccattgattagtgtgaagcccggcaagttattaacaacgtttactgttggcacagaacggttggtacttggtctaataccattgtcatcaaatgacagcacttcgttaggtgcattttgtcctgcattattggcattaggatcagttgttggcgtatatggcgctgtaattgcaactggtgcaccaccgtttcctaccgctgcagccgctggatctgctggagttgcattaggatctgccggtgccgcacgtctacttctctttttcggtctattagatgctggttcagcaattgcaactagctctggtttatttgaagaatgacgaacatcttcttgaatttcctttaaagttagatgtcctcctgaaccattttcatttgttttagttggtacatttaatgcggtattattcgacactacatcattattattagcgtttgacactgtctcagttgctgttgtattgccatctgtatgattattgttttgtgctgaaggcgtacttgattgcactgatgttggcgtagcttgatttactatactaccattattatgattaaccaatgcttgattcgttgcttgattggttgttgcagattgattaggtgtattctgcgcactatttgctaaacctctattattagcaacatctttatcttgtgaatttacaggtgttgcttgattagtatcgctttgtacattattatccgtagttaaggcttgtgcaccatttgggtttgaaagtaataaaactgttccgattaaagtagagaatatgcctactttatacttcctaatactatatttatttttctttaacaaattcatttcattttcctcctggttgtctgttctctgctgtgttgttaagaattatgctaaaaatatacgctccctcatattatatttatagctatattattttgtacaatattttaagttcactcaattttatcatcatcattttataaaataaagttttattttattacaatttagtttccgttttgtaattaaaatcttaataaaacataacaagaacgctttagattgttttgtaacagaaagtaattcataccaaaaaacaccaagcaaccgaaacgttacttggtgtcattacaaatgtaatattattttaaattatgtcactactttaaatactttttatttccaaaccttcatcgccccatgcgtgcatgccgccttcgacatttacggcatcaatgccatttgcctctaaatattctacaactttagcgcttcgaactccaccagcacatacaatataatatatttcatttttattaaatgaatttaaattatccggaatggtatccattggaattaactttgcattaggaatatatcccattgctgtttcttcatcagtacgaacatcaacaatttgaactggtttagattctaaaagtttattttttaattcatctgtagtaattgacttcatttcaaagtcctccttaaaacattatttagctacaatattgactaatttttgaggaacagcgatgactttcatgatgtctttaccttcaatactcgctttaacattgtcattagataaggcaatttcttgcatttcttcttttgatgtatctttagcaattttaattttagctctcaatttaccattcacttgaacaacgatttctacttcatcatctacaagtagtgcttcgtcataagttggccaaggttggtacgtaatagactcttcatgtcctaattttgaccataattcttcaccgatatgtggtgcaataggtgctaacattttaacgaagccttcaatgtaaggtttataaacttcatcaactttataacactcattaataaataccattaattgactaatagcagtattaaatcctaatgtttcaaagtcttctgttacctttttaacagtttggttataaactttatctaaagatttattatttgtagttacaatttttgaactcaatgtcccatcttcatttaccattaaacgccatacgcgatctaagaatcgacgagacccatctaatcctttttcactccatgcaattgcagcatctaaaggtcccataaacatttcgtaaagacgcaaagtatctgcaccatgagactgtactatatcatcaggattgattacatttcctttagatttactcatcttctcattaccttctcctaaaatcataccttggttaaataatttttggaaaggttctttagtaggtacgatagccaaatcataaaggactttatgccaaaatcttgcatataataagtgaagaaccgcatgttctactccaccgatatataaatcaacaggtaaccaatgttttaatttttcaggatctgctaacatattttcatttttaggatcgatgtaacgtaaataataccaacaactacctgcccattgtggcattgtatttgtttcacgacgtcctttcatacctgttttttcatctacaacatttacaaatgaatcaatattagctagtggagactcaccagtccctgatggcttgatttcatctgtttcaggtaacaacaatggtagctcttcttcaggaacagttgtcattgttccatcttcccaatgaatgacaggaattggttcgccccaataacgctgacgactgaataaccaatctcttaatttgtaattaactttcttttcgccagcacctttttgctctaataattgaatagctttagtaattgccgcttcattttctaaaccatcaagttcaccagaattaatatgtttaccttcaccagtgtatgctgcttcttcaacatttccaccttcgatgacttcaatgattggcaaatcaaactttttagcaaattcataatctctgtcatcatgcgctggtactgccataattgctccagtaccatatgttgataatacataatcagcaatccaaatttgtactttttcaccagataaaggattagttgcatatgcaccagtaaatacacctgatttatcttttgctaaatctgtacgttctaaatctgactttttagaagcttctgtttgataagcttttactttttctttatattcatctgttgtaattgaattaactaatgcatgttcaggacttaagactaagaatgatgcaccatagattgtatctggtctagtcgtaaatacttctacttttccttccgtattatctacatcaaatgaaactttggccccttcagaacgtccaatccaattgcgctgcatatcttttaaagactcaggccaatctaaatcatctaaatctgctaataattgatctgcatattctgtgattttaagtacccattgtttcatcggcttacgataaactggatgtccaccacgttcagagacaccatcaatcacttcttcgttagataaaacagtgcctaatgctggacaccagttaactgcaacttcatcaacgtatgctaaacctttgttatataactgtatgaaaatccactgtgtccatttatagtattctggatctgttgtattaacttcacgatcccaatcataactgaaccctaattctttaatttgtcgtttaaaagtttggatatttttctttgtaaattcacgtgggtcgttgccagtgtctaaagcatattgctctgctggtaatccgaatgcatcccaccccatcggatgtaatacattatatccttgcattcttttatatcttgaaatgatatctgttgctgtatagccctcaggatgtccaacatgtaaaccagcacctgatggatatggaaacatgtctaaagcataaaatttcttttgacctaagttatcatttgttttaaatgttttattttcgtcccaatagtcttgccatttcttttcaatttgattgtggttataattcaacacatttcctcctattcaataaaaaagacacctctaactattctatttacatagggacgacatttgccgcgttaccaccctatttcacaaaaattgtgcactcattttaatagtaagagatgtcattcattcaatttaaaattaatacgatttacatttagtccttaacactagctctcagcatcactagctttctgtagaaaagctccaaacgaaattaaattatacaaattaatattatgttataacgacatttatttcaagtctataacgttaattctatttactcattatgcatctatttttttaggttgcgtattattctccttgaaaaccattaataatattaatgcaaatacaagtagtagcatcataccgataaacatcatgcgcatattaaacgcatcaactaatacaccaccaagaaatggaccaaatgcttttcctactgtagcagctgaattcacaaaaccttggtactgtccttgcttaccatctggcgctaactgattggctatagttggaactgctggccatacaaacatttctccaaaagttaaaataatcataccgacaacaaatattgtaaagttttcggcaaaactcgtgacaaagaacgacaacataaaaatgatgatgccgacaaacatttgcttctttaagtttccttttaacagatagagaatcggtttaattaatggttgtgctactaaaatcattattccgttaattgtccataaaacactatattgtgccattgaaatattaatagattgtgtaaatgaagcgattgtagactcccattgaatatatgcaacccaacaaattgcaaacattgcacaaattagtactaatgaaataaatcttgctttattctttttaccagtaatatctaaatgagttggatatttaactttcgcattaatttcaatattaaattgcgttaccgcgacaagcgcaaacacaacatacataataagattggctaaaaagatatagttaaagctaaattctgcgacaaagccgcccattgcagcaccgacagccacaccaatattttgcgctaagtatatcgcattaaacgtttgtcttccgccatttggccacactgctccagccatagcgtatatcgcaggaataatcattccgccaccaaaccctaacattacaagccatacagcataccaaggccacccgtgaaagaaattaagtagcgttgtactacaaagacaagtgaaagttccaattaaaatcgtcttgtatccacctaatttatcaaatagtgaaccacctaataagtttccaataaccatgccaaatgaatttatcattagcactaaaccagcaacagttaaactttttccaagttcttgtttcatataaattgtatttaaaggccacaaaaaactggaaccagtaatatttaacgccatgccaattactagccaccagactgatttaggtatattcatatttcatagttcctctctcttttttgtcaaactataataaacactataacattaaaatatgttaaaatctgtacttagaactctttttttatagaaaggaaaatgacatatgggcaatcatttccaatacgcttttgaaaacaaacgttatcacacatggaattaccatttaaaaaataaatttggacaaaaaatatttaaagttgcattggatggcgggtttgactgtcctaaccgcgatggcactgtagcacatggtggatgtacattttgttctgctgcaggtagcggagactttgcaggtaatcgtgcagattcaatcgcagtacaatttaaagaaattaaagaaaagatgcatgagaaatggcacgaaggaaaatatattgcttattttcaggcatttacaaatacacatgcaccggttgaagtattaaaagaaaaattcgaacctgtacttaaagaaccgggtgttgtgggattatctattggtacgcgtcctgactgtctaccagacgatgttgtcgaatatttagcagatttgaatcaacgaacatacttatgggttgaattaggactacaaacaatccatcagtcaacatctgatttaatcaatcgtgcccatgatatgaaaacttattatgatggtgtggcaaaattacgtaagcataatatcaatgtatgtacacacatcattaatggcttacctggcgaagactatgacatgatgatggctactgccaaagaagttgcacaaatggatgtacaaggtattaaaattcatttacttcatttgttaaaaggtacaccgatggtaaaacaatacgataaaggtttattaacttttatgactcaagaagagtacacaaacctagttgtggaccaattagaagtgattccccctgaaatgatcgttcaccgaattaccggtgatggtccaatagatatcatggtaggtccaatgtggagtgttaataaatgggaagtattaaatggcatcgatgctgaattagcacgtagaaattcttatcaaggcttgcgttacaagtctaaggtgaagcaatgaaattagaacgtatactccctttttcaaaaacacttattaaacaacatataacaccagaaagtattgttgtagacgcaacttgcggtaacggcaatgacactttatttttagccgaacaagtaccagaaggacatgtttatggtttcgacattcaagatttagctttggaaaatacacgtgataaagttaaggatttcaatcatgtttctttaataaaagatggacatgaaaatattgaacatcatataaatgatgcacataaaggtcatattgatgcagccatctttaacctaggttatttgcctaaaggtgataaatctatcgtgacaaagcctgacacgacaatccaagctattaattcattgctatcattaatgtcaattgaaggtattattgtacttgttatatatcatggtcatagcgaaggacaaattgagaagcatgcattgcttgattacttgagtactttggatcaaaagcatgcgcaagttttgcaatatcaatttttaaaccaacgtaatcatgctccattcatttgtgccatagaaaaaatttcttaagcatttgctgcgctatactatttataatttaggattgagtagtcaacatttgaaaaattaatgccaacaacaaaaagaggttttcaacttaatgaaaacctctttttatgctattaaacttacacagcaataattgcgtttaaactattttgcattgctgttgctctacttgcaatcgcatcactgatgaaattcaacaactctactttctcttgttgtaacttttcattgaaatgaataataactgttctttcatcgtcaacaggacgctctttgtaaatccattctaattcaactaaattattatacgttctcgtacgcttatacggtttaacttcaacaaatctgtccatttctttaagcgtcatagaacctttttgccataaagttagtaaaattaaaatttcttctctagacattttgtattcgctttcaatctcgctgaaaattgagttaatgtcacccaaaagtgtttctaattgcaaaattccaaatacagtgtcgttatttacttttttcatgctaaacatctcccaattaataatcacatatttagctactatacaagtattaacaaacatcccaacaatcccaaaacttgtatgtgctaacttatgcataaaactacaagtgtaaataaacttgctttctattcaattgtcaaagttgaataaaattaaataagtataaaaaccaataatcaatagagttaatatttagaaataagataatagtacataaaacaaatcactctattacatattaattttataatttatatacaaagaaaatatatcaatattaccattaaattgcaacaattctacatatatttcttcaaaaaagatacgcattgaatttttattacatataactctcatgaaaattgattaaactaaattaattagttagccttaaatttaacaaattaaatcaaaccgaatgaggctaaattggttatttttcaagatatgatttgtataaatcaaaacatttcttacaaatcaaatgtgtataaaatgtgatatacattttcaaccttaaaaaagttctaaaaaaagatgagcatctactgtctcatctttcagttcttttttacgggtctgttttctaatttgagcacaatcttcgatttctttatctaaatgactaccaattaaatctatttcttctattgttaaatcgctatctccatcttcttttatctctggtattattttttcttcaactaagtcacgatatagtgtttttgaattctcgttcaatttcgattcgtgattttgaatactttcttccgcaccaatgtatatctattggcactagcttctacttttgtaccatcaataaaaattgaattatcatcaataagattttgctttaaacattgactatagaactgaataaataaagattcaattaacgcatcagtattaggattcactctaaaacgattaatagttttataagaaagtgtttgatcttgggctaaccacatcattcgaatactgtcatgaagtaatttctctattctacgaccagaaaatacagattgagtatatgcatataagatgatttttaacatcatttttggatgataggatgttgcaccacgatgatgtctgaattcatcgaattcgctatcaggtatcgtttcaacaatttcattaacatatcgcgaaatatcattttgaggaattctaacgaagtttctattggtagtgtaagttggggtcatgttataatttttatacataaggcacctctttaatttagtttagtagtatttattaaattatacgaagggacccaacacagaaaattcattttattgaattttacatttatgtgcaagttgggaaaaatgtcttattttttcaaagtatttaaaagtaaaattacatgttaatacgtagtattaatggcgagactcctgagggagcagtgccagtcgaagaccgaggctgagacggcaccctaggaaagcgaagccattcaatacgaagtattgtataaatagagaacagcagtaagatattttctaattgaaaattatcttactgctgttttttagggatttatgtcccaacctttttagaatattaaatttctacaatttcgtcatcttcaacaataaagcccattgtattgacgctgttatttaagaaagtcagaatataacgcattacttcatcacgttctggctcattgtgaacctcgtggtaaaaaccttgccaagctttaaaatataattcaggtgtttgatatttttctttaaactcatcaattgccctagtatcaacaattaaatccttcgttccatacattaatagcgttggcattggttgaatgtcatgaatatgagccatcgtatctttcatcgtctcattaattgtattataccaatgatacgttgctttttttaacattaaaccatcgttaactgtttcttcaacaatttctaaattacgtgttaaatcttttggttctacaccaacattaaaacgtgtgtcttttgaaattttacctatatttgaaacaagtttatctttacgattttttccattcttttgaagttctagcataggagaaattaacatcatcccctcgattggcaattctactttttcaagtaaatttaataaaatcaaaccgccaagtcctacccctaatacataagtaggaattttatattcattagctatctttaaccagtctagcaaactttcgtgatacgtttgaaagttttcaatttgtcctttattagctcttgaagtttgaccttgaccaggcaaatctcccataatcacatgatagccatttcttcttaacatcgtaataacatatgcatatcttcccgtatgttctaatatattatgagcaataacaacgacgcctttcgcatcattttcagcttcccacttccacattattatactgcccctttttcattaatcttcaataacataattatagcaaattcactatgtagatttctatttatagtattattgttgtccatattattatatataaatgaaatcaacatcaataatagtgtaattatacataattatttttgattgtttttgatgaaaacgctttctcgaatatttttttcatgctaaacttattgtaaacacaagggtttggaggagtagcaatggcactattaaagaatttttttatcggattatctaataatagttttttaaacaacgcagcaaaaaaagtgggcccacgtttgggcgccaataaagtcgttgccggaaatacaattccagagttaattaatacaatcgaatacttaaatgacaagaatatcgctgttacggtagacaatttaggggaatttgtcggtacagttgaagaaagtaatcatgctaaagaacaaattttaacaattatggacgcgcttcatcaacatggcgtaaaggcacatatgtctgttaaattgagtcagttaggtgcagaattcgacttagaattagcttaccaaaatttaagagagattttacttaaagcaaatacttacaacaatatgcatataaatattgatactgaaaaatatgctagcctgcaacaaattgttcaagttttagatcgcttaaaaggcgaatttagaaatgttggtactgtaattcaagcatatttatacgatagccacgaattagttgataagtaccaagatttacgattacgtttggttaaaggtgcatataaagaaaacgaatcaattgcatttcaatctaaggaagacgtagatgcaaattacatcaaaataattgaacaacgtttgttaaacgcacgcaatttcacttcaattgcaacacatgaccatcgcatcattaatcatgtaaaacaatttatgaaagaaaatcacattgaaaaagatcgtatggaattccaaatgctctatggttttagatcagagttagcagaagaaatcgcaaatgaaggctataatttcactatttatgtaccttatggcgatgattggtttgcgtattttatgagaagattagcagaacgcccacaaaacctatctcttgctgtaaaagaatttgtgaaacctgctggcttaaaacgtgttggcataattgcagctttaggagctacagttatgttaggtttaagtacaattaaaaaattatgccgtaaatagagcaagacataaacaataatttaggagtctggaacaataatcaatgttctaggctcctaaatgttatattggcagttctgaaacatttataaatctttgattatgaactcacaacagtgctctatgcttttatagattttaataaattagccatttcaattgcacttactgctgcttcagcacctttattgccagctttcgtacctgctctttccacagcttgttcaatactttcagtcgttaaaataccaaatatgactggtacattagtttgatcattcactttagaaacacctttcgcgacttcattacaaacataatcataatgagacgtagcaccgcgaattacgcatcctaatgtaattactgcatcataatttcctgatgaggctaattttttagctactaaaggaatttcaaacgcacctggcacaaatgctacatcaatattgtcttcattaacatcatgtcgaatcaaagtatcttttgcaccttcaagtaatcttccagtgataaaatcattaaatcgactaactacgattgcaactttcaaatcttttccaattaatttaccttcaaaattcatgttaaaatcctcctatattaaatgacccatttttatttttttcgtttccatataatcatgattatgtaccgtttctggtacgataacttcaattctttctgcaatatcaatgccatattgttttaatccctcaaatttacttggattattacttaataaattgatatgttcgatgttaaaatattttaaaatctgtgcagcaatatgataatctcgcaaatcttcatcaaaacctaatgctaaatttgcagttactgtatcatatccttgctcaattaattcatatgcgcgtaatttgtttaacaatcctatgccacgaccttcttgaggtagataaataatcatgccaccatgttcattgatatacttcatagacgattcaagttgagcaccacaatcacaacgttgactatggaaaatatcgcctgtaaggcacgcagaatgtaagcgtacattttcatgttgtcgaattgcaccttttgtcagtacaactatctcttcatctgtgtatgtcgctttaaaaccatacatatcaaatgttccgaaatctgtaggcattttcacttttgccttaaattcaatttctggttctaattttttacgatattcaattaaatcatcaatcgtaatcatctttaattgatgtttttctttaaacttttgtaaatcttgtcctttcgccatcgtgccgtcatcattcataatctcacaaatgacaccagcgggcttggcaccagtaagtttagctaaatcaacagccgcttctgtgtgtccatttctagctaatacgcctttatcttgtgctactaatggaaataaatgaccaggacgattaaaatctttagcttcactactaggatcaatgagctttttggcagtcaatgtacgttcataagcactaattcctgttgttgtatctacatgatcaatactcactgtaaattgcgtaccaaagatgtcggagttatcatcaaccatttgtaccaaatccaaacgttgtgcaatatctttagacactggtgcgcatattaatccccttgcttctttcgccataaaattaatggtattatcgttcatccattcagtaaccgctactaaatcaccttcattttcacgattctcatcatctactacaataattggttctccattttttaaagccattaaagcactgtcaatattatcgaattgcatgctacccctcctaaaaaccaaatgctcttaatttatctacagataattggtctttatctttatttaaaatattttcaacatatttaaacaaaacgtctgtttctaaatgtactttatctcctaattttttggatgataaaatcgttgaacgcctcgtttctggaataagatgaatgtcaaaactgttatcatgcttatcaaataccgttagactaacaccatccacagtaatagacccttgcttaactaactgattattaatatgttggctacattgaatcgtaataatttttgcattggctgtttcatttatttttgaaactgttcctagttcatctacatgaccgaggacaaaatgtccaccaaacctaccgttaccactcatggcacgctctaaatttacttctgattgtcgcttaacatctgctaaataggttttattttcagtgcctttaattacttgaacagtaaaagatgtctgattaaaatcaatcactgttaaacatgcaccattaacactgatggaatcaccaatatgcatatctgccgtaatcttatgtgcttcaatttcaatcgtcctgactgattgacgaatttgaacacttttaacgacacctatttcttcaacgatgccagtaaacatgcatcatcacttctttcgtaaagttaatttaacattttgatttaataactcggaatgaacaatttcaaattggttcgcatctggtatctcaatcacatcatttgtttgataaaattgataatttccagatccgccaattaatttcggggcataatagagaataaattcatctatataattagattggagaaattctgaagtagtggttggacctgcctcaactagcaaagttccaactcctcttttatataaattgtgaagaattgttgttaaatcgcaagacttcaagtaaataatttcaatatgtgtttgattggttgttaaatttggattttcagtatatatccaaattggtgttgattcatcttgataaatttgctgattaaaatgaatattcccagacttagacaatattacttttatagggttttttccatcttgaatacgtgtagtatattgtggatcatctaattcaactgtacgtcttccagttaacactgcgtcgtgtcgatgtcttaacttatagacatcttgtttaacctctttgttagtaatccattgactttgtccattatcattcgcttgtttaccatctaaacttgcagatactttcactgtaatttgtggcagttgctttgcttttgctttaaaaaagtcttggtataattgtgatgcccgttcatcatcaacgcattcaacctcaataccgtgagcccgtaacgtctcatcaccatgtgtgtctaacgaattgtcttttgttgcgtatactacttttgctatcttacaatcaattattttgttaacacagggtggtgttgaaccaaaatgactacatggctctaacgtaatataaatcgtcgcaccttcagcattttgttgtgccatatcaagtgcttgaacctccgcatgcttgtcaccttttctcaagtgtgcaccaataccaacaatcctaccttctttaactacaacagcgccaacgggtggattaacacctgtttgaccttgtaccatatttgcaagttgaatcgcataatccataaattgactcaaatgatcacctctataaacaaaaatcctcacatcatgaattaagatgcaaggagaaaaatttatcgttaaataagcctatttgtacacatttttacaaatacgctacattatctttgtcgataattaacattctttctcccatccagactttaactgtcggctctagaatctcactagatcagccactaatatgaaacatattagcaggtcgcaggctttatttactgccggttgggaatttcaccctgccccgaaagaattatatatgaaattgttatagattatttgagtacgtagtatgtcaactacatttaaaatgatactatatgttttctgaaaaaacaattaatgacggttttaatttaatataatctgagtactataggcatctcattgatatgattcttactaacagacattaaaatcaaaccttcaattcgtctctatagagcgttctctttattatcttctagttacaaattattgattgtcactgcgctgttgttgctcattcgattctaaagcatcatataattgagatactgtatgcgcaacttgttctacaatcattttcacaccgtttcgtagtttattaacaccgtttgtcatttgacctatcgcaatcatatttgttaatgttccaaaccttggactaataacttgattggtttccggaatgatttgtatgcctcccattgggtgtgcttgtacaatttgtctattttcaagatttctaattaattgatcatcttgatccaattcatttaaatgactttttgcacctgtcgcgttaatgacaacattatatatgtctactgattcttggtttttgtatgaaaaataatacaacttgccatcatgtttcacatcttctaaatcttttttcaaaattaaagacttattttctattaattcaataattagttcagcagttcttggaggcattggatttgaatttaattgaatcatctttgagtatttttgattaaattgatgttggtcttcaatacttaagctattccatatccaatttaaattctctttcaaatgttcaatcatactttggaaaatgcccatttctgttggacgcgctaaatcatacttcaaatctgcaatatgatttcctgtacgtctatgtactaattttttaaaatcaatgtcataatcagcacattcttttaaaaataaagaaactaaagtatcaagcggtgcattgccgaaatgatgttttttaatgtcatttaatttgtctttagttaagtacttgaatgtcacgtctatcattgtacctcttacacttggtaaatgagcagaacgactcgtcatagtaattggtaattttggatgatgagcagcaacataacggacaacatctaaactggcaaggcctgtaccaataatcgcaatatcgtccagttcatttacttcgtctaacgtattatatgttggataaggcgtagcgatatatccttttttaccctttaagttatatggatcatggtaggcaaatgtaccacatgttaaaaatacataatcgtacgcttgccatgattgtcctgaatttgtagtacatatgtaataagttaaattcgtttcatcgatattagaatttgtataaatctcttgaactttattataattagttgatatatttggatattttttcgtgaacatagataaataagatttcatataatgtccgaatacaaatctcggtaaatatgcaggttcatcaaaattaaaatcagtttgttgtttataccacttccaaaattcagtctcatcatctaaatttaaactcatctttttcgaaggcatattaattagcagctcagaactatcattttgaaatggtacgccctgtcccatatttactttatcatcgtataaatctatatctaattgattaaacttcgggtgcttaactaactctctcaatacacttacaccagcagttcccatgcctattattgctacacgcatatatcatccatccttttgtaattcaaaatattatatttaaactattacctataattatagcaatttggtatttccaataaaatttattaaggtaagctattatttcactttcacaaccattaaaccatttaaaacttttcatttaatatcaaccttagtgtttgtgttaaaatatttttaacgaggtgaattaaattgaaatttatagcaaagatattaatctcattagtaattctatttatgatttttagtcgtaaaaacaaagcttcttaatcaatacccttgattacaaaataaattcaactaaggtgattggccatacactcaagatatggctaatcacctttttcaatgcagaacaaagagtatattttgcaaaatcaatatctataatttatctttaatacccttttaatactaaaaccaaatttaaattacatagtcatatcgtgtaatataccaaaggaacatagacattcatctatatagatgataatctatttaacgtctaggaggtatgttatgacgtataaagaactagcaacatttttaaaagttttatcagattcaagcagattagaaatactagatttactttcttgtggagagttatgcgcttgtgatttgttagcacattttcaattctctcaacctacacttagctatcatatgaaagcattagtaaaaaccaacttagttacgacacgaaaaatcggaaataaacatttataccagctcaatcataatatttttgagtccgtaattaataacttgtctaaggttcatacctctaaccaacgatgtatttgtcataaccttaagactggtgaatgctaatgatgacaactttagcgacactcatttttctagtaactttattatttgtattatggcaacctaaaggcctagatattggcattaccgcactaactggtgcctttattgctgttattactggtgttgtaagtttttccgatgttttcgaagtaacaggtattgtttggaatgctactttgacttttgtctcagtcattcttatttcattaatattagataaagttggattattcgaatggtcagctattcacatgcttcatgcttcaaaaggcaatggtttaaaaatgttcgtttatatcatattattgggtgccattgttgctgcatttttcgcaaatgatggcgcagcgttaatcttaacgcctattgtattagcgatggttaaaaatataggttttagtaagcgggccatattcccttttattattgcgagtggttttatagctgacacaacttctttacctttaatcgtgagcaatctagtgaatattatatctgctgattattttcatgtaggattcgttcgatattttagtagaatgattatacctaatttattctcgcttttagcaagtattatagtattgtggttatattttagaaaagcgatacctaaaacgtttgatgataataatataaagcatcctaaagatgccattaatgatttaaagctatttaaaatttcatggattgttctagttatattacttttcggctatctaatcagtgaatttactaaaattccggtatcaattttcactggaatcattgcttttatttttctaatgttggctcgtaaatcaaatgctgtaaatattaagcaagtcattaagggcgcaccttggaatatagtattattttcaattggtatgtatatcgtcgtattcggcttaagaaatgctggcattactttaatattggctaaaatattagaatatatttccaattacggtctatttagcactattttgggaatgggcttcatttcagcgtttttatcatcaataatgaataatatgcctacagttttaatagatgcgattgctattggtcaatcaaatgtccatggcatgttaaaagaaggcctaatttatgcgaatgttatcggttctgatttaggtccaaaaattacaccgataggctctttagctacattactgtggttacacgtcttaacacaaaaagatgttaagatttcttggggcacatactttaaaactggtatcatcattacaattccagtactatttataaccctcatagggttgtatctaacacttatcatattttaattaattaggagattgttatgactaaaaaaacaatttattttatatgtacaggcaactcatgtcgaagtcaaatggctgaaggttgggctaaacaaatcttagcggatgattggaatgtatattctgctggtatcgaaacacacggtgttaatcccaaagcgatagaagctatgaaagaagtaggcattgatatatcaaatcatacatcagatttaatcgataataatattattaaaaattcaaatttagttgttacattatgtagtgatgcagacgtaaattgcccttctttaccaacaaatgttaagaaagaacattggggatttgatgatcctgcaggcaagccttggtcagagttccaacgtgtaagagatgaaattaaaatcgcaattgaaaatttcaaatcacgatgagagtgggacagaaatgataaaaaaacactaatgatttattatgtagtggttctttatcattagctataactaatgtgtacttaaaaataggaatacatgagtaaaactcatgcataagaaatactaatttctaaagaaaaagtaattctttatcgatgtcctgccccacttgcattggtgggattatcaatcaatgtgttttctctaatgcaaaaagacgctttctatcaaaacaagatagaaagcgtctttttagtatgtccgagtcataaaaacaactcgtagcttatcaaattacttattcaaatgtttactgtcatctttatacacaaagtatttgaagtattttccttcagtcttcatgttcttataaaagtcagcgataattgttgcattactttctgcccacttaatatctgtagcatattgatgttctcctggattttttggattccatctcatactatacaatgtattttgatctgtgcttgataagaagtgcttatgaatgaaatcagcaccgcctgaaatagctttttcaggtgtatcccaaccatgctttttagcatattctgcacctgttttaattgggtctttatcaagggctcctactccatagaaattgtagtactttttgccatcaatttcgactccattagctaattcacttttaactgcgccagtttctaataatgcatgtgaaattaaataaacttcgttaacgtgcttatctttagcagcttttaagaaatcatccgtatgtttcaataacgttggtctatctactaacatacgtttaattctatttttatcaatcccttgatactttgataaatctaaaaattgatatttttgcttttcattatcgataaaagtaccgctatccattgcacttttaatttcagttgcagatgcatctctccatgcatcattctttttatttgatacctgttgactcgtataattatttatttgtttctttgctgcatcgtttaatgtaacatttaacttttcaatcttaatgtcggatttaacatgtttgaaaaatatctgatcggatatcattgagaaaaataaaaatgagacaacagcaaatatgacaacaagtcctattattccaaaaatagaacctttcttgtgtttattcatatccacacctcttaggtcattgttgttatacattcagtttgactacgataataaagtttaacattattaaaaccgtttaacaattttatctatgcattgttacatattcataaataaacagtaatgtaaatgaaacgttttaaaccatttatcaacattactttacgttgatctacgaatcataaatgttttatctttttgtataacctttgaaaacctttatatcaataatcttattattcacgtattaaaaaacaaaaaattcttttgttcgtttacttagtttcttttttataatccatcataataaaacttgctgcatttgatctatttttataatagtactgatttaaatcaatcgtgccttcaatttgaccatcacgatacatcatttcattagtgaagttatttatcatcacgaaatcagcgcgatctcttataacatctaaatcgtcgtttcgtgcaaaaaaatgttctaaatttaaatgtgcgtaatccattgttacctcccgattacaaattttgttctatctactatttagcaaagtaataatacatcatatcacattaaattaattacttatgtcttatatttaacacttaatttagcgattacgcaaatgaatgatttttctaaatattttattctaactttatccggaaatatttgttatacgtataacttggagaatgactacttgaaatttaatgacgtatacaacaaacaccacaaaatcatacaccatcttttaaaaaaatataatattagctataattatgatgagtattatcaactactcttgataaaaatgtggcaattgagtcagatatataaaccctcaagcaagcaatctttatcctcttttttattcactcgattaaatttttaccttatcgatttattcagacaacaaaatcaattaaaagatgtcattttatgtgagaataattcaccaacattaactgaacaaccaacatactttaatgaacatgaccttcgtttacaagatatcttcaagcttttaaatcaaagagaaagactatggctcaaactataccttgaaggatacaagcaatttgaaattgctgaaatcatgtcattatcgctttcaacgattaaattaattaagatgtccgttaagcgtaaatgccaacataattttaattagtttattgtgaaatttcggtcgatgtgttaatgatgttgaaacaccctaacatcttcatataaatttattttaaccattaaattaacaacttattaaacgaggagtactatatttgcaagacaattctactaaatatctactttatatccaaactgctacttcaaaccatctcgaaacaaattgtgtctttttacattgcgattacattcttaaagttccaattaacaaactcgtttcatattatgcgaaattgcatttatcatcacaaagtgtgctaattgagactgcaaaaaacatactaaatattaataaactggttcctatttacatcaacccaaaaactatactttttccgttaaaacataaacgtgcaccgatacaaatttatatcaatgcacattatattgttggtatgactgccatagagaattcaacattaatacattttcaagaaggcattcagctagaagttgatgagccattttctctagtttcaaaaaaatgtcatgaaagtttagctttgaagcacttcattgaaaatactatttcgaattaaatttaatttctaaaagtttcttagtaaagtatgatgtcacaatttttataaaatatatgctagcaaacattaataaaatcgctccaataattgttaaaataacaacagttgtagataaatctaccttaggactaacgaaaaattgtacgccagatagacttgtaattagcccaaataaaaacaaacctaataaagcaacataagcaaacatcatcactactaatgtaacaaacatactataactttttgtttctttatttcgaaatacattttgtcttaagtaagcattagcaaaggtaacaggcttatttaagttaacgctgtcatcatcagatatagaagacaatcgttgatctaatgcttgtttctccttcttgttcaaaaaccataattgctttttaacttttttatcaaatgatgctttattcataattaaggatttctctcctttataatattgacgtaattttaaacattagcgtcaattgaaagtgtattttatatattttacagaaatatatgtatcaaatctacaaaaatccatattacaatttcatttatggtgatttgacgctaaaatacagtctgctaatttttcaaactaatgctttttaggtaggtacaatgataaattttaatcgtaaatatgtttcatatattatgaatctagccttaatcatattgcattcaaaataattttaaaaaatgaaaagaaaggatttagcatgcaaaaattcaaagactttttttacgatgatttatcggttacacgaggaaattattttttaactttaatggcagcattttttattactatcattttatttatcggcatagttgtcagtgaagtacatttactttatagcatgctaattgtattagtaggtttaattctattgaggctattcaaaatcaatttattctcttttaaaaaattaacattgtctcaagttatttatattataggcggtgcactattaatttatgggttagataatctttatttatattttcatgacgtaccggcaaatgaacaacaattagagcaagcaatacgaaatacaccattctatatttctattttcactgttaccatcatccccgctattgtggaagaaattgtttttcgcggtatgataataagggttatcttcagaaaacacttgtttttagggttaattgtgtctagtttagtttttgcatcattacacgaatctgacacttggattggttatttaccttacttatattctggtttgatttttggcctaatttatataaaaacaaaacgattagaagttgtaatattcatgcacttcttaaataacttgttagctctgctctttataatatggagataattttgagataacctttcatattattttcaaattatctatctgatatttattttattgaacttgagtcaccacttaaactcaaaaatacgtgtcatcaagtgcaaaataatttagaactaatacaaacataaaaacttttactttacgcttaaaatcaaaagtcacatacctagatataagtacaacttgtatattttgtactctaataggtatgtggcttaaataatatttaattcttgagttgcatatagtaactgtttttattcattttctaaaatatgcaagactaatttccttttctactcctgttgaatcaatttagacttttttataactcgagcttttacttagctgaattttgacttcttcttcattaataactatgatggaaaaacccccataagcacaatgcctatgagggtttaaatatatttatatattatagaatagaaagacctgaagattgaatatctttcgcaaagcctttaactgtatctactgataattcgttaatatcgcgacctaagtttgtattcacttttttcacaacatctgctgggcatgtaataatatctgcaccaatttcatcagcttgaatcacattgaataattcgcggcaacttgcccataataatttaacgccgtctttactatgcgtaacttttacagcctctttcattaatggtaatggatctacgcctgtatctgcaatacgtcctgcaaatactgaaacatatgttggcacaccttcagttactgcttcagttatttctttaacttgttcaattgtgtaaacagccgtaacgtttaatctcacattgtcagctgaaagttttttaattaaaggaatcgttgattcaccttttgtatttacaataggaattttaacaaatacattttcgccatattgttttaaaattgctgcttctttttccatagtttctaaatcgtctgcaaatacttcaaatgaaattgaagcatctggaatttctttcacagcttcttcagcaaaagctttgtaatctgttacgcccgctttagccattaaactaggatttgttgtaaaaccatccacttgtttgtttttataagctgctttcatttcttcaatatctgcaccgtccgcaaatacttctacatttagtttagccatataatatagcctccttgattcttattaaaattttaacaacatctgcatgtctttttcttacaaccatttgtaaaaaatgatttttatttctttgttatataaaacatttatatcacgcttttataatatatagctaattttttgcctatattttttaaaaatgactttagcaaacattgtgtctacaagttaataaaactattgttttatgattgtttatgatacgatatgtaaatgataatcatccaggaggtctagcatgtctcgttcaaaaaaatacttttacttatctagcttaatgattattttaagctttttctttaatacaaataacgttttcctaagtggactttttaattcttttattaaattaatacttttctgcagtgttattaactcaattgtactaattttgtctataatttttgcagatcgttcaattaaatcactaaagcctgatgcagattggattagaattgcgagtaaaagtttgccttggattattctaattgttattttagtacatatcttttcaattgttcgtacattcggttttatttaaaaaagttaatatgtcattgtagccttaatacaaaacaatacaatgtatcatgctataatgagtaaaacaatttgataacgttgttgcgtataaaaaatattagattttcgaaatcataactatgcatctaatcgctatagttatacaacaagatataacatataatgaggtttgataatgcatcgacaatttttgtcgtcgcgttgccaaaacctcttttttaaattcaaactacttcttttcgaggtgaaccaaatgcaatatgtatatatttttatcggtggtgctttaggcgctttattacgttacctcatttcttttctgaatactgacggaggttttccaatcggaacactgatagccaatttgactggtgcctttgtaatgggattgctaacagccttaacaattgcatttttttcaaaccatccgaccctaaaaaaagctattacgactggttttcttggtgctttaacgactttttcaacatttcaattagaattaatacatatgtttgatcatcaacaatttataactttactactatatgctgtaacaagttatgtctttggtattttgttatgttacgtcggtataaaactaggtggtgatttatcatgatatcaatcattttagtcatgattggcggcggttttggcgcaattgctagaagtgccattactgattattttaatcataaatttacttcaaagttacctatcgcaacattgatagtaaatctagttggtagttttttaattggattaactataggcttatcaatttcaatctcatggttccctgcgttctttgttaccggttttttaggtggcttaacaactttctcaacgttagccaaagaacttacactaatgatgacgccaaaatttaatattaacctttttctcaattattcacttttacaattcatcattggatttatagcttgttatattggctatcatatttaaaaataaaatgcttcattcagcaaataggtaaattacgacaccttcctgaacgaagcattttttaattttcatgcaaatttttaagcaccatataatgcctaccaaatttcaataatctttgttgccgtttaaataatgtgaatgtcaataaattctccaaactagtcgaaaataaagggagtgggacataaatccctaaaaaaaagcagtaagataattttcaattagaaaatatcttactgctgttctctatttatacaatacttcgtattgaatggcttcgctttcctagggtgccgtctcagcctcggtcttcgactggcactgctccctcaggagtctcgccattaatactacgtattaacatgtaattttacttttacatactttaaaaaataagacactttgcccaacttacactaccaatagaaacctctgttagaattcctcaaaatgatatttcgcgatatgttaatgaaattgttgaaacgatacctgatagcgaattcgatgaattcagacatcatcgtggcgcaacatcctatcatccaaaaatgatgttaaaaatcatcttatatgcatatactcaatctgtattttctggtcgaagaatagagaaattacttcatgacagtattcgaatgatgtggttagctcaaaatcaaacaccttcttataaaactattaatcgttttagagtgaatcctaatactgatgcgttaattgaatctttatttattcagttccatagtcaatgtttaaagcaaaatcttattgataataattcaatttttattgatggtacaaaagtagaagctaatgccaatagatatacatttgtgtggaagaaaagtattcaaaatcacgaatcgaaattgaacgaaaattcaaaagcattatatcgtgacttagttgaagaaaaaataataccagagataaaagaagatggagatagcgatttaacaatagaagaaatagatttaattggtagtcatttagataaagaaatcgaagatttaaatcattctattgagaacgaagattgtgctcaaattagaaaacagacccgtaaaaaaagaactgagattaagaagttcaaaaagaaatttgatgattattccgaaagaaaaaataaatatgaagaacaaaaatcgattcttaaagatagaaatagtttttctaaaactgatcatgatgcaacttttatgagaatgaaggaagaccatatgaaaaatggccaacttaagccaggatacaatttacaaatagcgacaaattctcaatttgttttatcctatgacctatttcaaaacccgacagatactagaactttaattccatttttaacaatgattcaaaataccttcggttatttgtagctgatgcaggttatggtagtgagcaaaactatatggccattatagatgattttaataaaacgccacttattacgtatggcatgtttattaaagataaaactagaaagtttaaaagtgacattttcaacactcaaaattggaaatatgacgaacttaatgatgaatttatatgtcctaataacaaaagaataggttttaaaagatatgcataccgtaatgatagatatggttttaaacgagacttcaaactatatgaatgcgatgactgttcagcatgttctttgaggcaacaatgcatgaaaccaaattcaaaatccaataagaaaatcatgaagaattataattgggaatactttaaagtccaaattaatcaaaagctttctgaaccagaaacgaaaaaaatctatagtcaaagaaaaattgatgtagagcctgtttttggatttatgaaggctattttgggtttaactcgaacgtcagttcgaggaataaataaagttaaacgagagctaggttttgtattaatggcacttaatataaggaaaatagcagctcaacgagctgtacattataaaatacatatcaaaaaagctgatttctatcaaataattaatagaaatcagcttttttacattgcctaagaacttaatgtcccaagccctgacaattcatctaaccttttcatcagttgagcgattttaatctagccttcaaatttttttggatcaggtccaattctcttatcttgatttaaaccatcaattcgcgtcatttgttcatctgataattcgaaatcaaatatttggaaattttcagagattctgtttggtgtcaccgatttagggattgtaaccacagcatgctgcacattccatcttaaaacaacttgggcaggtgactttcctaattcttgagcaatgtctttaattgtctcatcatttaaaatttgtgcattcatcaatggtgaccaagattccatcacgatacgttgtgctgccaaatataatttcaatttatgttgggttaaatatggatgatattcaacttgattaattacaggtttaattgacacttgtgccaacaaagcttccaaatgttcaggttcaaaattgctgacacctatatttttaacattattatttttatataaatcttccatacctttccatgtatcaaccattacggcttcgttcgtacctggccaatgtactagatacaaatctaagtattttaaacctaatctagataaactagcttcgtaagcagctgctacattttcacgaccgaaatcctcaaaatataattttgaagtaataaataagtcttctctagcaataccagttgactccaatccggcacgaatgccagcacctacttgttcttcattcccataaacttttgcggtatcaatactacgatatccttgttcaatggcatacttaacactttccatgcaattttcatcattttccacacgaaatgtccctaaaccaatttgtggcatcgtgtttccattataaaatgttttaacctccataaatatcgcctcacctttttgatgtattataccctgttatcataacaaatctgagttgaatacatgagaaaaaacacttagagcaatcaaccactaaaattctagtaatatctctcaaatattaatcaaattgtaaaagtaattctgtttaatttatgacaaactaaaaaagccgaagtaacaacatatagtcatcacttcagcctaacatttaattgaatgattcaattttatccatcatttgttgtaagtcttccacgttgtattgaatacgaccatggaatacaaatttgttaaagaactcgtctaattgttcagcaccgacaagcactttgacagcactattttgattataatttgaaatcgttacatcgccttcatttttaagattaaagtataaaattgaagttggtgtatatttggcacctaattctttttgtaagtcttcagccaattgtttaatcgcctcaatttgatctgaataatttacaaatgataatgaacgtttgtcatcattttgatccatcacaatagtttgcggtctagatttatctaaatccaatgtatcaaatacttgttccattggtggtaaatctttaaattgaccgccactaataccattataaacatgaccttttaacaattgagaatcaataatataaagaccagttcttgttaatactaaatgactaattcgttcaatattattaaagccatcctttggtaaaaagatatttgccataatgtgcatatcttctggtcgaattcgtttttctttaactaatctttcacgaataccaattaatctcatgtccgttacatattcactatgatttttcgagaacaattttaatgcgtcaatctcacgatcttttgtactaaccatgtgattataatcttcttgttgttttgtaattgtctttttattttgaatacgctctttctctaaagcttcttcatgagactttttaatgttttgttcttgttgttcatacttttcttctgtttgtcgcttaacttttttcttactacctaaggcaactaaaaaaaggacaaaaaagattaatgcaatgactactgcaataatgagtccaatgactatcggtgaagataaatccatcacaacaacgctcctttttaatatatgaataactttaattataatagaaaagctaaagattttcgatacatattatcatttatataccgaaaatcttttatttagctatattcaattcatcttattattttactgcgtcttttaattcttccactttgtctaatttttcccatgggaataagacatctgtacgtccaaaatgaccataagcagcagtttgtttgtaaatcggttgtttcaaatcaagcattttaataatacctgcaggtcttaggtcaaagtgttttctaactgcttcgacaagttgcccttcagaaactttacctgttccaaatgtatcaattgcaattgacactggttctgcaacaccaatcgcatatgccaattgtacttcacattgatctgctaaacctgctgcaacaatatttttagccacataacgtgcagcgtatgcagctgaacggtctacttttgtaggatccttaccactgaagcatccgccaccatgacgtgcatagccaccgtacgtatcaacaatgattttacgtcctgttaatcctgcatcaccttgaggtccaccgattacaaagcgtcctgtaggattgatgtagaatttagtttgttcattaatcaagttttctggaacagttggataaatgacatgtgctttaatgtcttcttgaatttgttcaagtgtcacatcctcagcatgttgtgttgatacgacaatcgtatcaatacgtactgggttatcattttcatcatattcaacagtgacctgaactttaccgtctggtcgtaaataatttaacgtaccatctttacgcacatctgataaacgttttgccaattgatgtgataaataaattgctagaggcatatacgtctctgtttcattcgttgcgtaaccaaacattaaaccttggtcacctgcacctgttgcttcaatttcttcttcgctatctttatcacgatactctaatgctttatccacgccttgtgcaatgtcaggtgattgttcatcaatcgcagttaaaattgccattgtttcataatcataaccatattttgctcttgtgtatccaatttctttaattgtttctctaacaactttcggaatatcaacatatgttgttgtagaaatttcgccggcgatcaatgccatacctgttgtaacagttgtttcacaagctacacgtgcatttggatcgtcttttaaaatagcatctaatattgcatctgacacttggtcagcgattttatctgggtgtccttctgtaacagactctgaagtaaataatcgtttgttatttaacatagtttgctcctttaaatttatattacgaaaattctctctctgtgagctaaataaaaaagaccttctaactattaatatagagagaaggcctaatacgtccattcgctcttatcgttcagacctatttgtctgcaaacggtttggcacctttcttttataaaaaagaggttgctgggtttcattgggtccatgtccctccaccactcaggataagagaatccgttaaaaataatagtacctaattaatgaattaatgtcaatttttcacaaataaatttacggtaaaatattgtagattaattatgttaatgtgttatactaattaaatgtaaaggcttacatttaaattatcgctttggagggatttaggatgtcagtagacacatacactgaaacaactaaaattgacaaattactgaaaaaaccaacgtcacattttcaactttcgacgacacaactttataataaaatcttagacaataacgaaggggtattaacagaacttggtgctgttaatgcaagtactggaaaatatactggtcgttcgcctaaagacaaattttttgtctctgaaccttcatatagagataacattgattggggagaaattaatcaacctatcgatgaagaaactttcttgaagttataccataaagtactagactatttagataaaaaagatgaactatacgtatttaaaggctacgctggtagcgataaagatacaatgttaaaacttacagtcatcaatgaattagcatggcataatttatttgctaaaaatatgtttattagacctgaatcaaaagaagaagctacaaagattaaacctaacttcactatcgtttctgcaccacattttaaagcagatccagaagttgatggtactaaatctgaaacctttgtcattatttcatttaaacacaaagtcattttaatcggcggtactgaatacgctggtgaaatgaaaaaaggtatcttctctgtaatgaattatctcttaccgatgcaagatattatgagcatgcattgctcagcaaacgttggtgaaaaaggcgatgttgcattattctttggtctatctggcactggtaaaacaaccttatcggctgacccacaccgtaaactaatcggtgatgatgaacacggctggaataaaaacggggtctttaatatcgaaggtggctgctatgcaaaagcaattaatctttccaaagaaaaagaaccacagatttttgacgcaatcaaatatggtgcaattttagagaacactgtagttgcagaagatggttcagtggactttgaagacaatcgttatacagaaaacacgcgtgccgcttatccaattaatcacattgacaatattgtagtaccatctaaagcagcacatccaaatacaattattttcttaactgcggatgcatttggtgttattccaccgatttcaaagttaaataaagaccaagcaatgtatcatttcttgagtggtttcacttctaaattagctggtacagagcgtggtgtgacagaacctgaaccatcattctcaacatgtttcggagcaccgttcttcccgttacaccctactgtttacgctgatctattaggtgaacttatcgatttacatgatgttgatgtttatcttgttaatactggatggactggcggaaaatatggtgtaggacgtagaatcagcttacattacacacgtcaaatggtaaaccaagcgatttctggcaaattgaaaaatgcagaatatacaaaagatagtacgtttggtttaagcattcctgtagaaattgaagatgtaccgaaaacaattttaaatccaattaatgcttggagcgacaaagagaaatataaagcacaagcagaagatttaattcaacgttttgaaaagaacttcgaaaaatttggtgaaaaagttgaacatattgctgaaaaaggtagcttcaacaaataaatttgaatactaaatcaaaaccacccgtgtgaacgggtggtttgttctgcggctataagccttccttactggccagccctaaaagggcactgacaagtcagccaactgcactactattccagcaaccctaaagggttactcttttttctttctttttttatttttctctccagtgaaaggatctaaatattcttccattgagatttggtctgcaacgatatcctcttgtaattgattacgaatataattttcaatcacttttttatttctacctactgtatccacataaaatcctttacaccaaaactttctatttccatatctatactttaagttagcatgtctatcaaatatcattaaactactttttccttttaaatagccaacaaatgatgataccccaagtttgggtggtatactaactaacatatggatatgatctttacatgcctctgcttcaattatctctacaccttttctttcacataattgacgcaatataatccctatatctttttttatttttccatatatcacttgtcttctgtatttaggtgcaaagacaatatgttacttacaattccattttgtatgtgctaaactgtttgtgtcagatgacattaaatagcatctcctcgtgttgattattttggttggctgaccaatatttattctagcacgtagagatgcattttttgtgacaatggtagaaccttttctgaaccatacgcatagcgtatggttttctttttacaattaaagagccaaccgttgttatagtctaacaatggttggctcctcttattttatgtgctaaaaatttataggcaattttattacaacaatgtacatttaaggtgaccttcatgccaaaatcgcatcactcatttaatggaagcagcacgtcttcatataaagtaccgatccctaattcaacgcatgtagtaccacatcttcaaagcttgatagttcccatgcgcacaccacgtttcatactagctatgcgactcaacttggttcataaactctttaatataagtcaatgtttcaaccatcgctggtggtcttggcacatgtccttctgccatttgataaaatgtttcatgcgtggcaccttttaactctagttggtccgctaaataatacgcatgatgaataccaacttgctggtctttccctccatgtacaattaatattggcggactgttttcattaatgtttggaatcgcttggcgtgcctcatatgccgctcgatcttttttcggatgaccaatcattcttcgtagcatgcctcttaaatcgacacgttcttcatacattaaatcaatatctgagacaccaccccagattgtataacttgttactggtaagtcttgaaatgtcaacaatccttgtaaaccacctcgcgaaaaaccaaccatgtggataaatgcatgtggatatttatcatgtagcaaccttaataattgcgtcacatcatttaaatcgccacggtaaaattcgtctttgccttcactcccattgttacctcggtagtatggcccaatcactaaagtttgactatctgaaaattgcattaatctacctgcgcgcacacgtcctacttgacctttgccacctcgcaaataaactacaatgcgatttacttcatgatgtggtgtcatcattaaagcttttacttgtaagtcatctgacaaatatgtaatttcttcgaattgatgcgtaaaatattcaattggcattcgtttacgtttgataaaacccaagtgattgcaccctctctacgcattttaaaatggtactatcttgcagtaagaaactccgttgtgcgagttcaatatcattgatacagttaaacaacactggccctgctgtttctaaataatcgttcttgcttaccaatgattcaacttcgataaaatatacatcttttacaaaatcagtttgatcatgtgtttcaatggtatattgtgctatgtaataaatatttttaactttggcgcctgtttcttcatataattcacgtgtaactgcttcagcactactttccccgcgttcccttttaccaccaggaaattcaatcccccgtaaattatgtttggtaaaaagcaattgatttttaaacgttggaatagctagcacatgattgccatctgctatctcattatcctttttaaatgtcaaattaacttgacgattatctttatccctaaacttcacgcgcatcacatccctacattgtatgttaatataatagttaattactatcgttggaggcattaattatgaaaaagatattcttggcgatgattcatttttatcaacgtttcatttcgccactcactccaccaacttgtcgtttttatccaacatgttcagagtacactagagaagcgattcaataccacggtgctttcaaaggcctttatttaggtatccgtcgtattttaaaatgtcatccgcttcataaaggcggctttgaccctgttccgttaaaaaaagacaagtcagcaagcaagcattcacataaacataaccattaatatggttgtaattgagttatatccactaaaggggggcgaaattcgagtcgcccctcttttaatatgcctgaatgcgccaccacatcttgttcaaaataataacctgctggtgtaacatctcctggataatcacctttacgagcaagcatcgctgtaaaatagcggcttaaaccatattcgtacatgccgccaataaccacttttgcaccatgacttttcaaagtatcaattgccgtttgcactttatcaatgccacctagacgaaatggttttaatacaacaactttcacattgtataattctatcaaattaattatgtccaacaacgatgttgccttttcatcaagggctattggaggtattgttccatccgctacttcatcaagcatggagatatctttaaatggctcttcgatataaagaacctgttcacgcgctaataactgtaactgtgtgaaatcttgacgatccaaggactcatttgcatctataaccaattgaaagtgaaagtctaattcccgtaacactctaatttgatgcatgatttgaggcgtccattttaatttaattctggtcggctttgttgcttttaatgactctagttgtttatttgataagccgctcgctgtcgctccatatgctactgaaaatgaaggcagtacatgaaacatttgatacaatgccatgacaatagttgcccttgcagcaggcgtattttccaatgaatctactaattttagtgctgcttcatacgtttcaaatgatttatttctattatcttcgaaccattgctcaattacatgtttcactgaggcaattgtttcatgatcataccaatctgtttgaaaagcgttacattccccgaaatatgcatttcctttgtcatcaatcaattcgataaacaaacaatcacgatgcgttaaagtgactttcggtgttacaatttgtgacttaaatggctcactatatttataaaaatgcaaagctgtcaacttcatcaaatcatcctctatacaacttatttctttgtaatttacctgttgatgtataaggtaaagtatcaaccttttcaaagtgtttcggtactttatatttcgctaaatgttgtgataaatatgcaatcaattgtgcctttgaaatgtcactttcactgacaaaatataatttaggcacttggccccaagtatcatcaggatgccctacacatactgcgtcactgatacctggaaattgcttcgctaccgtttcaatttgatatggataaatattttcaccgccactaataattaaatctttacgtcggtcataaatcatgacataaccttcatgatctatttcagcaatgtcacccgtattaaaataaccattttcaaacgtacccgttaaatctgttggatacaaatatacattcatcacattggcgcctttaatcattaattctccatgaccttctttattaggatttttaatttttacgtcaacattggcacttggcatccctacagtgtcaggacgtgcatgcaacatttccggtgttgctgttaaaaattgcgaacatgtctcagtcataccaaatgaattataaattggcaggttatattgtaatgccgtctctatcatagtggcagataatttagcaccgccgagtaatattttttgtaaattataaggttcatgtaaaccttgttgcataagccaatttaaagtttgtggcacaagcgaaatgtgcgtgattcgttcatttttaatcatcgttaaaatttgttcggcattgaatttatcaacaatgcgcacagtaaaaccttcaataacagctcttaaaagtacactgagacccgaaatatgataaatcggcaagacagatagccaattagtgtcacgatcaaatcccaagctctctttacatccgattgcactggcataatgattacgaaacgtttgtggcaccgctttttgagggcccgttgtccctgatgtaaacataatcgatgcaatgtcatctaaattaaatgatgtatttaatatgttggacggcgactctttcggcaccacagtttcattcgatgtttcatattggatacccattgtgttgtccaacaaactgttcgttgtaatatcccttccagcgaattcaatatcatccagcgatacaatttgaaaccctcgtaattccagtggcaaggtacaaaaaatcaattgtacatcgattgacttcatctgattcgtcatctcattaggtgtcaaccttgtattaatcatcgcaatttcaatatttgccaaccaacatgcatgtattaaaatgatcgattgaatcgaattatctatgtatagcccaacacgagattgttgataagccttgagtcttttagccaatagactcgcttcacagtataaattttgataagtataagattcttgaccgtctgttatcgcaatatgatgtccattttgttgtgcttgtttatataaccaaaagtccatgcgttattcctccaaaatcatttacattataattataacgattttatgacattctagcagtggttatgtttaaaaatataaaaaagtagacgaattgatgcattgatatgattgttataatgctcaatacatatcgttatatcattcgtctactattatcagttatttttatttaattttagtgtcattctgtcattttgatgtggtgatttacccattgttgccacatcatctgcaatgtcaattggtatacggttcatgtcttgtaatgcacttaaatggaatacttcatcatctaaattttcaatgagatatacataatatgttaccttgtcctttttatattttaacgttttccaaaagtccggcttgcaattcaatacattatccggaatatattcaataaataagtaacgtttgctgcctactttgtctatgaaatattttgcagtgcctttttctatacctcttatatgtgcatagtctgctgaaaagtaaatactacctattgtttcattatgttgttgtatttcaaatcgttggcctactattttattatttgtgctacaactacttaaaaaaatcagtagatatagcattaaacatattttcatccccttgaattttaaaaactttttcaaaagcaacacctctaaaaataaatacaatatattatagcaaatagaaattattattttgttaaattatgttgtcatgttcgtgtcattttgagtcgtaatacaactttacaattattaaattaacacttctacaatccaaaaatatttttaaagttttgaaaaaaattaaagtatttccactactaatttggtaaaatatgattatgtgatatagtgaaagcgttttacacttaataactccctcttaaatgcatccaggttttatgtagtaaatcatgaaaataacatataaatatagaggagatttacctttgaatacagagaacaacaagaatcaaaaccaatctgttaaaaattctgaaagacgcggcatgttaaaaggatgcggcggttgccttatttcttttattttattaataatcttattatcagcctgttcaatgatgtttagtaataatgacaattccactaataatcaatcatcaaaaacgcaattaactcaaaaagatgaaaataaaaatgaagataagcctgaggaaaaatcagaaacagcaacagatgaggatttacaatcaaccgaagaagtacctgcaaatgaaaatactgaaaataatcaacatgaaattgatgaaataacaacaaaagatcaatcagacgatgatattaacacaccaaacgttgcagaagataaatcacaagacgacttgaaagatgatttaaaagaaaagcaacaatcaagtaaccatcatcaatccacgcaacctaagacctcaccatcaactgaaacaaacacgcaacaatcatttgctaattgtaagcaacttagacaagtatatccgaatggtgtcactgccgatcatccagcatatcgaccacatttagatagagataaagataaacgtgcatgtgaacctgataaatattaaacaacaagcgaattgaattcaaattgtatttagctttatgcactaatcacatagtaaataatgagggagattttttaggcatgagcaatcaattcaaaagcgaagaagagcgaagacaatgggaacaattccaagctttccaaaatcaacaaaaccaacagaaccagcaatacggacaaaagaaatctaaaaaaggatggttctggggctgtggtggttgtctagtattatttattttaattatcatcggtatttcagcttgtacagctggtattacaggtaaccttggcggaaatagttctaaagaaacgaacaaaacccataaaatcggtgaaactgttaaaaatggcgaccttgaagtcactgtaaattcagtggaaactatgaaatctgtaggaccatctcttgcaccaacaaacgctaaaggtatatttgtcgttgctgatgtgacgattaaaaacaaaggtaaagaagcgttaacaattgatagttcaatgtttaagctaaaatccggtgataaaacatttgaagcagataatacaggttcaatgtctgctaatcaaagtgacaatggtagtatagaaaattcatttttcttacagcgtataaatccagatagcactgctcaaggtaaaattgttttcgatgtgtcagaaaacatagccaacgcaaaagataaaaaattagaagttatttctagtttatttagcgtcaagaagattacatttgatttatccgatgctaaaaaaacatcaaaagctaaaaaagacaagcaagatacagaagtagctgttgcgagttcaaatagcgataatgtaagttatgaagcttcggctactacacctgctacaacttctagtgcggatactgattctgaagatagcgaaaagtctagtaaagatgaggataagcagaatgcgtctaaaagtgataaatctagtgtagaaaaaagtgaatctaatgaggaaactgctcctgtagagcccatgccccatagcaaacctaccactagtgaagcaccacctagccaaaatattcacaatgaagatagcatgtacgacgcttcaacagaataaaatttcagggtagctcggctacccttcttttacggaaaaattaattatacataatcaaatcaaggagataaaaaaatgaaattcaaagctatcgttgcaatcacattatcattgtcactattaactgcctgtggtgctaatcaacataaagaaaatagtagtaaatcaaatgacactaataaaaagacgcaacaaactgacaacactacacagtcaaatacagaaaagtaaatgacaccacaagaagccgaagatatagttcgaaacgattacaaagcaagaggcgttaatgaatatcaaacattaaattataaaacaaatcttgaacgaagcaatgaacatgaatattatgttgaacatctagtccgcgatgcagttggcacaccattaaaacgttgtgctattgttaatcgacacaatggcacaattattaatatttttgatgatatgtcagaaaaagacaaagaagaatttgaagcatttaaaaagagaagccctaaatacaatccaggtatgaacaatcatgatgaaacagatggtgagtcagaagacattcaacatcatgacattgataataacaaagcaattcaaaatgacataccagatcaaaaagtcgacgataaaaatgataaaaatgctgttaataaagaagaaaaacatgataatggggcaaataattctgaagaaactaaagttaaataatggcatactttgattaatcgtaatttttaggagaaacgctatgataacatttgagaatatacaacaacttgagaaatacaccttaatgactatgcatggtctttttaatcaacttaaactcggcattatttcaatcgaaaacgcagagcatacgctttttacaccttatatgttggaaacgctctcttccctaggcgtgaaagacagcattgtcgatttaattcataaagggactgaattagaagactttgcggcatttaatttatcaattgaagacacagttacagtctgtttacaaagaactgaagaactattaaaacaatacaaaaatgtggaattcaatgacaaaatattaatcaattggcgtattatacaagagaaatagacatataaaagtcgaatgtaactacgtgagtattgattttattctttgtaaattacaagcatttcatattataaagtttgaaaagaggtatattgaaatggagaaaaatgaatatatagctaaatataatgaatatagtcaattattagacgctacatactcgcaagctgtagcataccttttaagtaaatatggcgctgtaaccgatgattattataaagaaaaatcatacacgcgatttttaaatggagaaatcaaaagtatttcaaaaggaaaatacactagagctagcgaaggattatattgccatcatataagcgaggacaaattccaaaatctatctgatctaagattcatttccaaatttaagtactcatacgacgttcaaaagaaagaaaacttagtgtactgtgatctaatcgagcatttaattttacatgcaattattacaaaagaatcccatggccaatttggtgtagctggattatgtcaaatgatcaaaccaacagtcattgattggtacattggcgaatataatccaaaaccagcatggatgcaagccaccaaagcacgtgcctatttgcctggaatattagtagagaaattactcattaaaattgacgatatgttaaaaggaatagaaatataagatttccttgagtctagataaatgattaatgtagatttattttttgctgttgagattttgttatagatgtttaaacctgtaattaaatatattttataaaatagaccacgcatacctatctataaacggacaatgtttataaatgagtttgcatggtcttgaattgtattaaatttcttttggttttaataaatcgactagattttcacaatatttatcaaatatgtattcctaaattatacagccttaatccagcagctactttcgaaacttccaacttagttgatataaggttcaatagtttgtttcgttctttttcagataaaccagaacttaaattgatattattgacttcataaaaattatagactaatgcctctatttgctttttaggcataagtaagtcgactgaaaactgatttacgtcgctttcataaatcatttcatgtaaattctttagactattatcgttactatctctcattaagtctgtatttttaaataaataacggcccaattcacgagctattgaaaatcttgtattattaatcgagtgattattattaatatagattgttcttccacttaaataacccgaagtattaccctccattttaatatatctaacatttaaattaagttgaaataatagcttgtctatgtcaatagcaaagtgttcagaagtaataaaaagttgatccattttgtcctttataaatgcctgaaataatcgaactatttttgattctaaaatatcttcataatgaactttctcaataactttcaattgattccccaccctaactaaaaaaatcgaacctacatcatttaataaatttataactataggtgtaaacattattaaaataaaacccctctactactatatgtaacgaagggacatgatttcaaaataaaataccttttttataaatttattataatatttttcattatactatacaaccgaatctaatctaacgatcctgaaaagaaaaataacggcggttccgcttcatattcatttttgtccaagtgttctttttcaattatttgattgacggttttccaattttttacttcatgctcttttaaaaaatggctatgaaaaattctatccccatagatttcttcatagccaatgctaatttgtttcatgtcatttctttaaaattcctaaaaatatataaactaaaagcataagtaacacagcaaaaattgccgaatatataattattgaaaaagcattgctttgcattggaactaaataatttaaagtacaaaataataataatgctaaaattccaactttaagtgaatattttaatctatccataaaatcacccttactgatatccccatttttctcctgtcagaacgtattccccggctgcattctttttagtttttaattttatatatattcccttactagtatcaatattcgatgcagctatagatccaaggaaaccaccaacacctgcgccaactaaacctcctgttagtgcagaaataacgctaatagcccccgcacctaaagcagctattgtttttgtatatgcagaagaaagatataatgttgcagtatctttacctgtttctacatattgagttttacccgctctcaattggtcttcagctttatatttttttatttcttcttttgtaaatatatcttccagtttataaccttttttctcaagttcatcaaataaattttggttactcaaatatattacctttgcttgagaatggtctaacttatcttcagcatgagctacatctgaattataagataatgaaattggactaacaaataatacaccagcagctaataataaagatttttaattcgtttttcattagtttcttttagatgatttttgtatttagatttcgtataaacagaaactagattttttcatgatcgacctatcttttgtccagatacagtgagacccttgtcatttaaatgatttttaattcgtcttgtaccaaagacttttctattagaattaaaaatatttatgacggcatgttctatgtttgaatcatctttagtgattttattatcttttctttttatagaatcataataggtacttcttagtattatcaggactttacacattgctgatactgaatattgatgtgcattcttttgaatgacttctatttttgccccataatcagcgctacttgctttaaaatatcgttctccatttttaaatgttgaacttctttgcgtaatttaatcagctctttttcttcatccgataagttatcttggtgattgaatgtacccgtgttttgatgttgctttatccattttcctacattttataaccgccatttacaaacgtcgaaggtgtgaaatcatactcgcgtataatttcattcctaggcttaccatttttatataatctaaccatttgtaacttaaactctgaactaaatgatcttctttctcttgtcataataaaatcgcctactttcttaaattaacaatatctattctcatagaatttgtccaattaagtgtagacgattcaatctatcagctagaatcatataacttatcagaagcaagtgactgtgcttgtatatttgccgatgatataatagtagagtcgcctatctctcaggcgtcaatttagacgcagagaggaggtgtataaggtgatgcttattttcgttcacatcatagcaccagtcatcagtggctgtgccattgcgtttttttcttattggctaagtagacgcaatacaaaataggtgacatatagccgcaccaataaaaatcccctcactaccgcaaatagtgaggggattggtgtataagtaaatacttattttcgttgtcttaattatactgctaatttttctttttgtaaaatatgcaaggttttaaagagaaacatcaagaactaaaaaaggctctatgtcaaattggactgatgcgttcaatatccgaagttaagcaactaaacattgcttaacttcctttttactttttggagcgtaaagttttgaacataataatattcgattgcgcaaatgattgtaacttccataaccaaaagatgtacgtttaattaattttattttgttatttataccttctaaaggaccatttgataaattgtaataatcaatggttacactattaaaagtgtcacaaattcttatgaatctggcataaactttgaattaactaaataagtaagaaaacctcggcactttatcattttaatagtgtcgagatttttatagatactacaaatatttataacatagttaaactcatctaatgacttatatttttgtttcatcacaatatgaacaattatttattggacgtattttgctctttttttatttcagaaactgacttaggatttttattaaattttctacccaattcatctgtataagaaatatcggtatcaaattgaaaatcatcaacagatcttataccagctgtaaatgataactttttatcattatttatataaccactaatagaataaccatccattgggttttctttaaaattagcgaagcttatatttttataacctttcacattgtacttcatataaatcgttattctttctttttgttcatcataatatttcttttcgtcatatttcatcttcaaaaagattccgcctagaatcaatattaaaattataattacaatcataagatattttttattcaaaaaatcaatctccttttcattgtacttattgacgaacattttgaataaattaagcatattgagttttacgatgattgtataaacgttacaacccatatgattgttggttttaacattagtcaatttttctttcttataatcttaaatcatgatttggtttactttaacacttaaataattatatttttatccattctattcataacatttattcaattggacctgaaaagaaaaacaacggtggttccgcttcatatttgtcaatagcggtttaagattggcgtgttttaaatacttaatcactttcaaaatctttttagtcagtatgattcttctataatcttaaagattttcatattataatattacacattttttcgaaatcttatttaaacttatttactagtttccttgtggattgttggttgtgttttagaaattcacgtcacaagttcaatataaatattgtttttttactttttataaaagtttgagcggtggcataaatatatagataaatctaaaaattacgcctaatttttgacatgtcattcttaattattttcttattatatttgccatcgtcataaaaaacattgtaccaccattcttgtctatctcgaagagaaattttttctagatatattttccatccaatagacaattttttagtattaagaaagtttaataaactttcttttttaataagtaaacattcattatcaaattcgagtaatttagaattaatacatattgtttcaccaaatttagttttccatactccttcttccgtttgtattaatgaaaaataatctactatttctttacacggaatataaaaacttattgatttgtccttaacagaataatctaactcccaaaaatattcataaatagctggacataatttaccatctgattcagttaaatatccctctttataatttttataagcttcgctccaataatattcatataaatatatactatgtgctcgaggaatattaatacctctatcataattattttcataacctttgataatttcattactatcttctttattataaaaatatcccatcgctaagaaataacatgagtctctatcttcaaatggtatttctttctctctcttttcaaaattaaactttgagcttaaacatatatatctatgattgtctatatctatttctaaaaataattttgtttcatcaaaaactttggtattttttacccattcattcgattgatgcgaaggaagtggtgagggtactagtatttttgattctttatcaatttcaagtaatagtaaagtaggatcaatatctctaatataatcatcccatagtccagaatattgaacatcaggaaatttatctacaagtttagctaaaatttcatagtaagcaatccattgatattttttgctaattctttcaattgaattattaaagttatcataacgattaacccacatatcaaattcaccatgtaattttgcatcataacccatttcaaaaatcctcattaatgctatattacttaagtcttgatcacttttaaaaccctttacccagtttcgtacagcataaccaaatacatatctgccaaaatcgccatatgccccagttcctcttccatattccgttgtcattgagtttttaattttatcgatagaaaaatgtaaatggctatctaatttgttttttaaagattttatgtaatcgtctatatttaaattcgaatattcttttttataccaattacttttataaggtggcctaattttttctaaatttatattagatatatcttttgataaactaatatattcaattgtttgcctagcataatctctcattaaaatatgaggatataccatttctttatcaaatatttcttcataaatataattagcaatctctatatgtatttcacaaatgtcgattcgaagtgtcgcccctaaaacagaagcatataatctttcgactatatatggatcattgttattttcaaataattttaataaaccaataattttagttggaaatgttttgaataattttactaaagatttagtaccgagatctcttaatttattattagttgcagaaaatatccacgttaaaaaaatcatatatttttccgcagtttcttcatctaatttcttatagttactaaatagccaattaataatttcaaaaaccttttcattatttatagatatatattgagtccataaaaaatctctttttcctaaattgcattgtttcaataatttatgtaaagcccaaatatttaacggatggtttttttgaggcatttttattaataagacatctaaaaaattatttctaaatgcatcataaggaataacattatcggatatatagcatttagtatgtttacttatgctaccatcttttctccatactaaactatttataaaagaatatatcatgttataattgtttttaaactgtggaaatacttcaaatagctctatattaaattcatttgctaatttaataaaaagttcattaataagacctctattataagataaatcgtcttccttttgaaaataccttgtcactttttcatctgactgtaatttagttactaaatctcttttatcaacatttctatatttctctaaaaggtattctgataaaaagtaatctcccatacgctcatacgaaaaataaataatcatttcacctttatagccagtatttttaattaatatattttcatctattagcgcttctaaaaatctatttgacttttgaacatactctttagctatattattaacaacagtataggattcctcataatttagttgattaaattctgagtcgttcattaattcaactaatccttttattactttttgtacaacattaatatttttatcaaaatcaaatttatcttccttagataaattaatatttactgtcttaagaacatttgtaaatagctctgcaacacttatagtttggtcaaattccttaaatttatttacacagtactcacacattagttttaaaaataatggattgttgaattctggatttaatataggtaacttaggtagctctaatccataaaaatcacaaaaagatacaattggattatagttttcttccttactaaaaccttcatgctgaaatactacaatattgttatcttgtattgcgtttttgggtaatataacatcttcaaaaggggttctaatagaaaatattaaagctatattagaatacttctttatatggttgataaagctttgaaaataatttccccataaccttttaccttcaccttcattaagcgcatcaataataataaaagctcttttttttgtttctttggccttattacttattgaccttaaaaaattatcaacagaatttgtaacttctaaatcattaagtatttgatgccatggatcttcatttttagtaaaaaattgtcccaaaaacagataaataatatgattttcatctctaagttttttagatagatgcgctaaaaggtgtgattttcctatgccagcttcaccttgaactagcaaataaggataaaacaagcattctttacatgtttcttttaaatacgtttgatattttaataatactttttcgattttactcatataagtttgaagttctaatttttcattctcacttattttgtatatattacattcattatgttctgtcagaaaaatataagggtcaatattaatttcgtctatcaattcataaatttcacttaagtattttttcttttcttcaaactcttcttccagttccaaataattattgactgattgttctaaattagagaatatttttttgaaattcaaataaatattctttgcgtattttgatttcatcttatctaaaatatcattttcgatataaccttttaattcttttagatatgaaatattagtatatttaaaattattggtaatagaaataccttctataattttattattaatagtatcgacatcattattcgcagtatatcgtgaagctaaattcgatatattaaattctaatttttcattaataaattcttcttttaaatatgacaaagaatcttcaaataaaagcggagataattctttttttaataattcaatagcgtgatcttgcttatttatgtttaaattcaaaaactcttcgcataagtcttgagttaaaataatatcttttttactatcgaataatatattatgtggatttgaaaaattcttatttttaatattattattttgatttccaataaatataaactttaatcgataaccttcttccattttatttgttaaatactcttttttagagtgtcctctattttttgctttttacacgttgcggtaacttgaataataattttattcgtattatctataagatcaaatgctggtgcatttttttgttttttattatgattctcaagtgaatacccatatacaatatttaacaggtctctaaaaaaatattcggaatatatatgattatttaaaatatttatctttcctagttcttcaatcttagtattaagtctaattagtgtatcaagaaatttttcttgattcgttgatcgtttcaagttttaagtctccttttaaaatgaatatttcacttcttataactaatatttaaacaaaatgatcacataataatatttaatttacaatatgccactacagtgtcaacattttataaacactattcatttgaacatggtctaaaacgaataggacattgtaaatgattaaatagtctgtctctagttgatgtatatggtcatttgttatgcagataataattaatctaattaatttttacgttttagttacttggttgtgattgaggctttttgtatctagttgtaatattctccttttttagaatcataataggtacttcttgaaatttttagaactttgcacattgctgatactgaatattgatacgcattttgttgaaagacttcattttttgtctcaaaattagcactgcttgctttaaatcatcattttacattatcaatcgatgtttttctttgcgtaattttattaactctttttcatcacttgttaaaatgtcttgatgattgaatgactcagtattttggttttgttttatctaatttgagaaagttaatgatgttagatcatattctcgtataatttcgtttctaagcttaccattttcataaagtttaattattttaatttaaattatttactaaaagctcttcagtctcttgtcataataaaatcgcctaccctcttagtttaacaatgtctattctcatagaatttgtccaactaaatgtagacgattcactaaacttctaaaaaaataaaccccaaattataatagtctcaatattaatatattacaatttattcataggatttttatcatttcaattaataggttgttatcagggttaaataaacattttttgtaatagtccttttttacgttcttttaataactcaattctattcatttgattattcattttattgtctatagattttaacaatgcacttactttatcttgttcagtgagacaaggtattttaagatttatattgcataagttcgcatgagttaatttagctggtgcattacctgtgacaaatgctcgtagttctttaaaatttaaataataattcataaaaaacaaattatgatcattacttttaactacatgcgcatgattatttacccagtattgcccattagcaataaagctactcgtctcaaactgcccccattttgcaccatcttctcctattagtaatcgttcttcattattgaataaataatcttttacgtaatcaataattccagttgcaccatagtaagggtataaccccttttctcttaatgaagaagtaattggttttcttctattattttcaaagataaagatgtcttttatgaatttgttttcccactctggatattcttcaccattctcatctttgaatcgcaattcttgtgtgaagattttctgcatatagccttttttctgttgttgaagcaattcaagtttttgttcttctaattcaatttgtcggtcgagtttgctgaagaacttgcctattttttgctgttcttcaaatatagttggggtgaagatttttaaattagcaatttctttgaagtttagaccttctcgactacctccactttgtgcaaggaaaattttccttttaccttttcttgataatagatactgtccaaaaaaattataataatactcttttttcaatctaataatacatacatgttgatttaaattagcatgcgtttcaactatcgaattaatggctgttctacctattgatgctcctgtaatatttaaaagaacatcaccatagtacgttctactatttttcatctcatcatctatatctttactaatataaactaagtcattaagatttaatttaccatttctaatattttgactccttaaaaatggtatgcctttgtttgtatagttttcacttccacctttgggagtctttccactacctattttggtagtaagattccctaacttcttctcttcccattcgccttcaaatcctgggaatctcaattctggcacatttttcttttgtgtattactcatctttcaacaccccaagttctttcaggtatgcattgatttcttgctcaatttctgcgatttctttatcgatatttttcaaatcttgttggacttgatctaaatcaatcggtgcttcttcttcgaatgtatcgacatatctcggtatatttaggttgtaatcgttatcggcaatctcttgtagtgtcgcgctgtagctatatttatcaattgtttccttacgcttatatgtgtctataatacgttcgacttgggcatcgcttaaatgattttgattttttcctttttcaaaatcattggatgcatcgataaatagtacgttgtcgtcttgttggcgacattttttaaatactaaaatacatgttggaatacttgtcccatagaaaatattcgctggcaaaccaatcacagcttctaagtagttcttttcttcaattaaataacgacgaatgacaccttctgcagcacctcggaataatacaccatgtgggagtacaacggccatggtaccttcatcgtctaggtaatgtaccatgtgttgaataaaggcaaagtctgctttagacttaggcgcaagtttgccgtaaccactgaatcgttcgtcattttcaaactttgaatctgcagtccatttcgcactatacggtgggttcgcaataaccgcatcaaatgtattgcctaaaaaggctgggttttccaatgtgtcatcattacggatatcgaagttctcataacgcacatcatgtaataacatattcatgcgtgctaagttgtatgtagtattgttacgttcttgaccgaaataacgatacacttgtgtttctttaccaacacgtaacaacagtgaacctgaaccacatgttgggtcatacacgtgacgtaatttatctttaccgtctgtgacaatcttcgccagtatcttagatacttgttgtggtgtatagaactcgcctgcttttttacccgctgtcgccgcaaagcgcccgattaggaattcatatgcatcacctaacatatcaatttccatgtcactgtgaacgaatggtaagtcgtcaagattaaccatgactttagagattaaagcagtacgttctttgacattgttacctagtcgcgttgaactcaaatccatatcgctgaacagcccgataaagtcattttcactttcttcacctaatgtagatgtttcaactttgcgaatcgccgtcgctagatgttctatatcgaaatcttgcgtttcaatttcacgaatcatcgcactgaataaatcttgtggctcaatgaagtaaccgacttgatcaattaattctgcttttaagtcttcacgatattcttcatctgcccatgcttcttgatacgtgatgtcttcacctgacaaggcatctgcatattcttgttcggctttttcagataagaagcgatagaaaatcaagcctaaaatgtaattacggaattcactcgcatccatgttccctcttaaatcattcgcaatcgaccataattttttatgtaattcagcttgttgctgacgttgtttttcagtaatagacatgtgattcctccgcctttgcataagtaatttatctctttgtgtaatagatttattataacatttggttatgttgcgatgttgataatttggatgttggtggtggaaattttgagttttagtggcgcaattgttattgaaaaattttatagaaatgttgtagctttcaaatgctttcaaaatcatttatattcttaatgatgtcaaaaagttgttcattcatacataaataaaaccaatcaacaattgagttggtgaaaatcaatcgttgattggctttgatgcatattaaataatgcaatatatattaataaatgttagttatagtatattttgtcaggattgggtgaatgtctaagttttaattatttatctaaattatctgcaatgaatttcttaatttcaggagagaaataaacagcaaatcctcttgtgctttcacctgatggcttattaccggcatagattacaccaatagcttcgtgtttactatttaatataggtgaaccagagctaccaggctgaataattgcatccgatgacactatattcccattcactgataatactttaccagttgattcatacatttgtagtttatttccattaggatttggataaccaatgactgatataggttcattttctttagcttctgatgctatattaaatttactagtgaaatctttgaattttctaccttttggttgtgttgatttttcttcaacttgtacaaccgcaatatcttctttaccaggataatctacaatcttagtaactttataaagtccaccaccgttattataaaaaccattaggatgtgctttgatttcatcaccgactttcatgtgataggtaacatgtttattggtaatgattgtatgatttccaactacaaatcctgttccagcgcccatccatgtaacaccactgtatggtgcaacatttgtatttgtaatttgtttaacagtattttcggctttggctgtttgttgaataccttcaaccattgttgtgccgacaccagttattgatgttaaaatcgtcaatgctgcaatacttttgatgattatatttttattcatttttctgctcctctaagtatttgtataattataatgttagctttttgaagttttattttttttaatcatttcgaataaatggaatcacagagatgatttgaattgttgagtttgttgttaatttttaaaatcatttatctatgtaaggatttatttatctgtgttatctgcaatgaatttcttaatttcaggagagaaataaacaccatatccttttgtacttttatttccagggccgtttccaccaaagtgaacacctacaacttcgtatttactgttaaatacagctgaacctgagttgcctggttctacgaaagcatcagtaataatcatgttgcctttaactgacagcacttttcctgttgactcatacatttgaaatttatttatatatggttctggatagccaacaattgaaatgcgttcattttctttagcttctgatgctatttttaaaatgcctgtgtaatctttaaaattcctgttttttggatgaacagctttatcttccacatgtagaatggcaatatcttcttgacctgaataacggacaatttttttaactttataaaatccgccattattatattcaccattgggatgcgctataatatgtgcaccaatttccatacctgcaacgacatgcttgttggtaacaattgtatttttaccgacaatgaaacctgttccagatcctatcgaaacgacaccattgtatggtgctacattagtatttttgattagtttcacattatgttcagctttagccgtttgttgaataccctcaaccactgttgtgccgacgccagtcactgatgttaaaatcgtcaatgctgcaatacttttgatgattatatttttattcatttttgtgctcctctaagtattcgtataaatataaggttaggtttttgaagttttattttttaaatcatttcgaataaatagaatcacagagatgtttaaaattgttgattttgttgttaatttctaaaaatcatttatcaatgtatggatggatgatttatttatctaaattatctgcaataaatttcttaatttcaggagagaaataaacagcaaatgaccttgtactttcacctgttggtttatcactagcatacataacaccaattgcttctcgcttactatttaatataggtgaaccagagctgccaggttggacaaccgcatcagatgtcactatatttccattcactgatagtactttaccagttgattcatacatttgtagtttatttccattaggatttggataaccaatgactgatataggttcattttctttagcttctgatgctatattaaatttgctagtgaaatctttgaattttctaccttttggttgcgttgatttttcttcaacttgtacgaccgcaatatcttctttaccaggataatctacaatcttagtaactttataaagtccaccaccgttattataaaaaccattaggatgtgctttgatttcatcaccgactttcatgtgataagtaacatgtttattggtaatgattgtatgattcccaactacaaatcctgttccagcgcccatccatgtaacaccactgtatggtgcaacattcgtgttggtaattaatttcacactattttctgctttggctgtttgttgaataccatcaaccactgttgtgccgacaccagttattgatgttaaaatcgtcaatgccgcaatacttttgatgattatatttttattcatttttgtgctcctctgtttattcatgatgcttttgatatagacgtttttttatgttatattcgaccgatgtttttcattaaaattattgaacacatgctcatggtgtatatttaaatttgtttattgttcaatgtgcttttgaataaaatctttgatttgaggcgtaaagtatacggcaccattatattcagaaccaatttttccaataccgccatacaccacacctatgacctcattgttagaatttagaactggtgatcctgaattcccgggttcaatgtatgcatcaaaatttaaaatattgtctttgattctttttatagttcctgtagattcaaactgtttaaaactattttgagcaggtaatgggtaaccaataactttaattttgtcatcaactttagcatctttcgcaaaattgaatgcttggacattttcattaaaattaaagccttttggtccacgttcgactgcttgttcttcaatattcatgacagagatgtcttcatcacccggataatcagaaatgcttttaattttatatataccaccatttcctttgtcaccgtttggatgggcagtaattctatcgccaactttataatcttttgatacatgtttattggtgataattgtattttttccaattacaaaacctgtcgcatctttaaatgaaacgacgccattatatggaaaaatatttgtatctttaacttgcgtaacattcttctctgcatttgctatttgttgtgtctcttcaacgactgcagcatttattccagttactgaggttagaatggctaatgctgccatgcttttaatgactatatttttattcattttcaagctcctttacaattcgagatatgttgcaacgctcgtttaaagtcaatttgtttatttatctatgttttctgcaatgaattttttaatttctggtgtaaagtagacgccatatgcatttctgttatcatcattttttacatcagaagcaaaatgaataccaactaattcgttgttgctgtttaatacaggtgatccagagtttccgctttcagtatgcgctgaatatacaatactgctaccttctactgacatcacagggccagttgactcatataaaacatatttatttttgtatgggtgtggataaccaatcactttaattcgctcaccagctttagcccctgccgcatatttgaatggcgttacattatcattaaaattaaagccttttggtccacgttctattgcacgctcttcaacttgaatgactgatacatcttctttacctggataattaataatctttttaatcgaataaataccaccattacctttatcactatttggatgtgcagtaatacgatcgcccactttgtaatttttcgacacatgtttatttgttaaaatagtattctttccaactacaaatccagttgcacttttaaaagcaactacaccagtatatggaaaaatattagtatctttaacttttgtgacattattttctgctttggcagtttgttgtacttcctcaaccaatgttgttccaatacctgttacagatgttaaaattgttaatgctgctaaactcttgatgactacgtttttgttcattttaagttcctctcttttaattattttgatatctagatacataattcagtatatttagttaattatgtaaccgttttcttaatcactctttaaaaaatcaacttcacgaatgaattgatgatacttatttttcaatattattttgaataaattcttttaattgtggtgtgaaataaacaccgaaattcttttcagattcatcttttccactacctgcatataaaataccaatcagttcatgtttagaattcaatacaggagatcctgaattacctggttgtgcatacgcatcaaattccataaacgttccactgatatggttaatcgttcctgtcgattcaaacattttatattttgtttgtgcaccctttggataaccaataacagaaattctatctttcacttttgctccgtctgcaaattttgtataactaacgttcttattaaaattcaaaccttctgtacttgtttcatgaacatgaactatcgcaaggtcttcttttccgggatattctacaatgtctttaacgtcgtagtttcctccgcctttacctttactcgaatgatgtgctgatactctatttttaaaaatatcattacttttagcgatatgtttgttagttacgattgtatttttaccaacaactacaccagtaccacccacaaatgctaccactgaattgtatggttccttagttgcatcggtaatttctttgacattcttttctgctttggcaattgaatgaggctgattagaaatattttcagcaaaaccaagagatgttaaaatagttaaagcagttaaacctttaaccattacatttttattcatattttacctccttccaaatttatttttatagttaatgtatctagatacacatttactatatacattttaaataaaaatattaattaaatattaattaaccacttattaacgttttattaaattattttacatgaattgactcatttatttaaatatgcttaaaactcaatatcacgcaattaaaattgactttttaggattattttggtcttaaatattaattattgaattaaaattgtaatatttattcggaaattaggtgattgaaaatatatggcggaatggtgaacaattcatgtatttataatctttcactttactatgtattgtgtttaacaacattattagcgattagttcccctattatttatgacaatatgcagtcaatcaatgaaacatgtatgtatgagtatatttggaactagtaatgtattgttaaatattgaagatgattgaattatggaatttttttcgagatatgttatttcggggatcagattttgcgattttgccttggatagagtagttgcgatttgtaaatacgtttttcaggttcgattcaatttcgttgttaagataatatggattagtttcactgacatgttgatgcatgtcttttttgttctgataaagtataaaatgtttacttaacattacttagtatgacacctgctaattcaaacattatttgagacattcttttcaaattaattataaatttttacctatagactagtttgatatttatctacatctcaaaattctcatcaacaatctttcacatccaacatttttactttagtttttataattcaaaacaacaaaactatgttaaaaaattattctattttttagttaatagatagttaatacatttttgatatttagttaattgttcttttaaaaaattattattatattttcattgtaaacgtttacaatataaaaaaaggagcaataaaaatgaatacaaaatttttaggtaaaacattagtagcaagtgctttagtattaacaacattaggaacaggcttacattcttcatacttaggattagatacaaataaagttgttaaaacggctaaagcagaagaaaaaatgacagatggtcaattatggaaaaaagttaaagattcattacatgattctgatattattttaagtaacgagtacgaaacaatcaacgttacttatttattaagcaatggatattctagcagcgtttctgctcctggaaatgatgatggaggccatctaacacaatctatagactttaaaggattaaaacaaattgatttaactaaggaaaatgtctacgatgactttaacaaaaagctagatgctaaaaatacatggaattctctaaccgagaagttaaaaggtcttggtttactacaaaatggccaaaaagtatctatttattcttcagatagctcttctccagtctcgggtaaagtgggagaaggagtaactagtggtggcgaaaatactctaactaaacgcttcatcaacaaaatcacaattgattaaaccttaaactcaaatttccttaattcataaaacattaataactaaccctttcttacaaaccacctagcccataatatattaaaacgtcatttttatttcaattagcggaaaataaaaaaaccattccgcattaactttggcaagttggaatggttaaaaaaatattttagaagccagcgtttggcttgcttagacgacatgttcgcgcatgtcgtcttatttttacatttatataataacacgcaattcaataaaatgtctaatcaataaacctcaattacattcaaattcaaaaacttttcacctaatattcatcgcttaaataaacattacgtttaattaaacagacattgtcaatcgcgtctaatacccctgctgtccgaaaacaaaattattttgtattcatatttaactgttctctttcctcccttttcaacgcaactaaatttcttttaccgttagagccccaatctttaatctttaattgttctaccgctccatttattaaatcctttaaagagtaaaactgctaatagcaacgtgataataatatagattgccaatgttaatgtaactggtatactcccttcgataaacatataaacgtaacgtgtagcatatgtgattggtaaatagaaccacgaatgatctccaagcacttctaatccaaaataaacgttaaaaataaacattaaaactccgacaacaatagccattacatctttaatgaaaatactaaaaataaaaagtagcagtaatataattacattgaaaaacaatgatacgcctataaacataagtgttattttcatatcatgtgaatgccacaataaattaattgatgctaatagaatacatatggctgtaatagtataagtaaaaatcattgatgcatttaaccaatttagcctattagcttttcctaaaatatgattaaagtgaccaatattttcttcaaaattgataacttgatagacgtttatagaaattaatagcgatgtaattgcattaaaactcgctgtaaacaaacttatttgtcgaccattccataaatttacgtttaaataccaatttataaataatataaacaatatggttacaataatgggtacaaatgtgagcgcttgcttagaaaatttcaacttacatgactttaattcgttaattatcattttaatcgccaacttttcttattatttaaaaatgttactatcgcgaaaataatgatgctaacaataatcgaaatatataaggcattgagatcattaaagtattttgaattatggtttacaactaaaccattaggtagtataccaagcgtaataagcgggattctctgcattatcccccacggcaacacccaaaataaactcttcaatgttaaaaacaagacacaaatgactgataatactaagtttattaatattgatacgaacacaccaaagtatcgagttaataaaaagttgagcggtatcaatggtagagatactacatacatcaacaatattgtcaccaataacaacatagcattaaccggatgtggattaataattaggtcacctatataagcaataataaatactaaaaagcaatgtaccaaaaatgctattgataaaatgaaaatctttgctcttatttcttttgtaatcgaccaattattacttaagtaataattaaatgatttatttctcatttcaattttaaataacgaattacaagccatacataatacaatcgggatgaaagcaattggccaaatattaaatagtaaagttatatatggtgacacactattcgctgttcccgtattacttttggcgaataagactgtgaaaatagcaaaacaaagaaataccagcggacttattaataaaacatacatactgaaagaatttttaaatttgataccttctatctttaaatgtatcatttgtaatcacctttcgttattttgaagaatatctcttctaagttttcatctttgttatttctttgctgatattttagctcaccctcatgaataataccgatatgatctgctaaaacttggatttcagataaaatgtgacttgaaataataatactagtaccttgttctgttaataattttagaagttctctaagttcttggattccatatgggtctaaaccattagatggttcgtctaatactaaaatttctggctttttaattaatgccattgcaattccaagtctttgtttcatacctaaagaaaagtccttaacctttttctttttatcgacatttaaattgactaagcttaaaacactattaatttcgctgaaatcaacgctttcatttaaacacacaattttcaaattatcttgtgcacttaaatgattatatgtcgcaggtgtttcaataagcgaaccaactttgtgcaaatcatttcgtgtcattggtctattatctaatttaatttcccctgaatcttgttgaagtatgccacatataattttcataagtgtcgttttaccggctccattaataccaagtaatccataaacttcgttattttctaaagtgatattaatatgctttaatacatcttgatttttaaaccgcttcgaaatgttttcagtaactaattttgccataatcaaaaactcctttgatttattaacttgctttttgatttgctacatttaatgctttatacacatcaagctcaccatgcccatatctactaaatggtttattattcttagatgtcccatgctgatataacaattcaatcgctttatctggatgtttttcaagatgatatttatcaatgattaaagctagtgctcccgaaactttaggtgtggctaatgaagttccagcttgataaatatatcttccgttattggcagtagttaaaatgttctccttatgcatatacccttcattcatccatttatccacaccgaattgatttaaataagcaaatgatcctccgggcgcagcaatatctgtataattcataccaaaattggaaaactcagatagattactcttttgatctgtagatcctactgtaacgacattgtccatagatgcaggaacatctttcacttcgccattaccttgatattcacgctgtaattttagtttctgtttgtcattgacatcaataccatcattaccagctgcagcaacaacgatagattttttcttcttggcgtaattgattgctttctgtaacgcatcgtattctactttttcatcttttctaaatgtttgatggtcatttttgtccaaaataatataactaccaacactaatattaatgacttgatttccatcatttgcagcttgaacaatcgcttttgatacccaaagcagttctgtttttttactaccaaacacgcgatacattgtaaatttgttattcggtgcaacacctattaacttaccattagcactcgtttgacccgacaccatcgtgccatgtcctttcctatcattgacatcgtgaacatcacctgtttcctccggttcagtacctctaaaaccgtttaaaggtactaaatttttagaatcagtcgagaaattatttttcaaatcgtcatggtttttcatcacacctgtatctatgattgctattttggtgttagcatgttttggcaaatcatcatacgatgcaccattattggttattttattcatatcccattgtcttgaaaataatgactcatttgatgttctgtctattgttttctcgctagtaatacaagttgaacatgtggcattgatatatttaatatcatttttatagtttgctaaagcattagcatgcattttcgtcattttaatctgtgccacatgtaattccggtatattatagacaacgtttaaggacttctttttaactaacttgttaaatgttgctgtatttttgtattcaacactgtaatatagttcttctgacgctgatgcattactcattgtaatagatattaaaagactcaatattattaaactaataatagcgcgctttatgattttcatattctaatctcaaatgaattccagaactttatatggttcaggtgcgacaacattctttttaaatgtttttgacgctaattcataactttctgaaatatttgctggatatattgatacaccataatcttttaataatcgaatattattttgagtaactggattttcccacattcgtaaattcatatttggaaatatagaaagtttttcaaaagctgtatgacaaatagttaataataaattgtcacatataccatttgcaattttattaatcgtattagaagtcgcaggtaaaataataatcttgtcatgtttatttgctatatctacatgatttaaaaaagggtcttcaaattcgtcataatagttatcgcaaaattgctttaatatttcaccattaataaactttctaccgtttgttgacgcgattacatttacttcatcaaattttgattttaattcaataatatagtggctaatattgatactattaactgagccacacaaacaaatcaatacattttctcccatgatatacgcctccattcagctaattaaaaacgcattggtccaatttttttcattgagaatttttgtatttttcagtgtcatcaatgttagatagacccctaattcaccttctaaaaggccaactttcctacttttaaatacatcttgcttattttcattaatgtctataaaattcaccagataatcttccttataatgagaaatcagtttatttattaatacagtgatataatcagacacttcatttaattcaaaattcaaattcataattgttaacattaatatttgtgatgacaatccatgacaaatagttggacttattaaattttcatctttatcatttactacttgtagcatcacttttttagacattttaattatttcatcatcttgtaatgcttggccgattaaaaacaacgtcgtcattacacccgtattgccataacaccaaccattccgaataaaattgaaatgattacgttcagaaattaaatcgtaacgctgcaaccatctttcgtggttacaaaatttttcgtccatgataaatttgtacatgtcttttaatatgtgctgatgattttcaatcgtaattcctttaatcacgcataatgcaaataaagacatcggtcctagcactccatgtgcaaggccaagattgatattaccttcagtaaaataatttttatcagactctaaaaattgactttcttgtgggactacccagctatttttagaatattgaatatctttaaagtatactaatatgctttttaatgctttaacattaaattcattctcatctactctatttagcaaatatctccctatcccagctaatccactgacagtatcataatttaatggatttaatggttcttgtaatatttgatcaaatttattttctatttcatttacaatgtgaccatcaatattatttaaaatattttgataatttttgccattttgcgatgctaaatccattgaaaatgcaatacctgaaagtccaccaaacaaagaattgttatattgaccactctgtaaatatggtgctaatttcatgatgtacttatgcacaatttgctcagtattaatatcgaaaactttttgataagcatctaaaaacaaaatgatacctggtataccatgtgataaagttgaaggttcaaaataatcggtttcagtagatgcttttgaaatgaaatcatctacttctgaaatctcttgaaacttcttcttcaatattagattcatatcaatcatttttgtcaccacaccaatgcttttgagttttaacaatttcttttacaatagataaaacaaatgtttcttgatccttatcaatgccaaatattcgattgcagcgcatatgaattaagctgccaataatccttgaccttttagtagttaaagtttttttaagcccttcatttaatttgctcaaaatttggttgccatcttttaaaattcgataaataccactatagtgtttagccatatattcaaaattattagcaggattacatatagttacaagttcatttttaaaaggtctaatatctttacttttaaatgatgtaggtacatagttattaacaatttccatacgctcttcattagaaattgaaaacatctcaaataaatacattattgaaatagcaacaatatatggtcgatcaaacttaaaatcattttcaataatattgacagctaaattcgtgtcatattcaaagaaggcttctatttcattaatcgtgttctttccaccatatctaaaaaattctggctcgtatgatacaaattcataatctgaaacttctgtcgtttgtcgaacatgtggtaaccaattcttcaagatgctgtatatttctgcgtaattttcgtcattcctgaataacctcaactttaaaatgtcaccttgtttgatataacgcattaaaaaatattgatctatatctcccttatctttaagatgttttacaaatggatacaaattgtcgatgataaatgtatcttgcgatggcttatcgatatgaatatgtaatgcaaaccagtctttgtcatattcaatatctgtatttttatattttggaatttcgatttcgggtcctcgataagatgattttttataaattggtgtaacaatttcatacacatgatcattctttgattgaggtaaaaatgattctactaaacgtacacgtttatgcttcttatattctttcatcaataaatatctatgattagctaatgataaatttagtagaagcttgttatctccataaactaaattcacgatattaggtatattgaattgttcttgatatttcaaaaattgttgatcccattcttcatttttaggtaaaggtaataccatctcgttaattttccaatatgctggtttaagaatgacatttttatatctgattcgtggtgaataactaaatgaatcaatactcacatcattcataggttcaatgcatttcacagattccattgaaatttctcgtaacaatcgatataaattacattcttttaaaaagttatacatattgtttgattcaaatagtacccttttatttagttggctagaatataaatataatttgttaaaggtagcaccaacataaatatcatctaaggtaagctcatactttgaataactattactacttcctaaattcaatgaatattcgtatgagtcatgattagttaatacattatgatttctcggatatttcggtatgttatttatagaaatcatttctacattgtcatcacatatcatcttctgataataatgtcctttttcatgttctaattttgctaaagtttcagtatcaattaaatgatgaaatcgcccaaatgtagcgccagcattaaaagacgccgttaaaggactaataacaatgagctcattgtactgattgtaaaaacgtcctaaataaagttcagcataaacatctgcactcattggcgcatgataatgattgatttcattatcgttaatcaatgactctacatctttttcatttatgactatctcatcgttatttctcaaggcatgtaaaaatttttgcttaagcattacaatattatttccatcggtttcttcttcttgaaaaattgttgtcccgaaacctgttatatctgaaatcaaatctttaatattcacgagttgttcaaatccatacttttcaataaaacggttgtgaagaactttcaaatctgtgaatccaatattatttcttgataaaagccacaataagtacgctgcttcagatatatttgttgctatatcttgatgtaaataattgttaatcatgtcaattttggtatcaatttgaagatagtttttacatttgaatagtgccttcatatgatgaataatgtctttatataattcctcgccaaatccaatttcagttttttcataagctaatatcaatttctggatttctctaatttttttcacaaaatcatcattatgtaaagaaagtttatttaaaatataatttaaattatcgctatatgataacggtggtctgattgttgaatatataatttcctttgagacaagattatggatatatactttcactttagtaatatcattaatttcaaattcttgatttatcttttcagctaaatttgaaaaagtaatattattattcgtcacagtggttttgatgaatacgagtaattcgctatttttaatggaaaaagatgtatctttattgttgtttaaataaatagcactttgttcatttaaatatattcgatcattgataatatgtgctttactattccaaataactttcaaattttgataatattcatcaatactctcaatataactaaccagtttatacaaccattcgccatcgactttcacatatttttgaatactatttccaactttaagacgtgttggttcatttacaaaatgccccaaattaataccacttaataatccaaatggagttggacgtgttgacattctaattaaatattttaataaactttctttagcatctctaaccttcttgttatcgccatcaaaatttatttcttgtaaagtacaatataagttaaatgttgttgttaggattgattctttcatctgagcatttaattgtaagtcgctatatttaatttgttcagtatttaaaaataaattgaaaaattcaactgataataaaggtgttctaatcatacaaatacttgacggttcgtaaatagtgttcatttgtaagcacctcacatatttgaatagacaaatagagccctttcaggctctatttgctgtaatcttaacagcagaagctattaaaactaccagtcttagcacaaccaggagtacataaactatgacttgtaatacgttcgtcacctgctgaatcatttgagttattgtttgctttaacttgcacgtctaaatcaagaactttttccatagataaaacctcctattattagttgaagttaaggcctacttcaattgtcatattatcccttttcacacaacaaatcaataaattatataattatattttgtgaattttttgtaaacacttattaatttagtaatactattttgataattagatttttgtgtttttttattactatttattttcactaataattttgcatctaagttcataattttaaatttattgatgaattttttaatagattaatcaattcatttatacaaatacttagatatttttatctatcaatactattacgaatttggagatggctgcttgagattaattaatagatatttatgcagttttgttctatttatacaaaatttagcaaataataattgaagttattttaaagatgaggatataaacatataatttcaatgacttgattattttcttaaatgacatgttctaagagggtcaatataataaccaaagcttgtcattacttatatgtaaagatagaggctaattacataatcctaacttatttaacaggaagtcatgaaaactatattacaactaaaagtataactttccatcaccaaagtcagaatttattgaaacactcaactgataatatagaaggctaattataaaaatacctggcgattaataaactgtttccgttttttagcacttaatatatttaaaaagacaaatagagccctttcaggctctatttgctgtatccttaacaacagaagctgttaaaactacccgtcttttcacaaccaaagctacaaaaaagatggctagttattctttcgtcacccgctgaatcattagtgttgttatttcctttaacttgcacgtctaaatcaagaactttttccaaagataaaaccccctatttaaaagttgaagttaagacccacttcaattgtcatattaatcattaccacacaataaatcaatgaatttaataataattatttgttattaatttgtaaatcgtcattaattttatggtactattgttagtttaaacaaataatgtaacttctttttttaatatgttgtgaatattttttgtttaactcttaaatttcgggtttaacttcctctatttctaacagttatactccaggattagtttctttagaatccgtaccgattaatttaacagtatggttttgccagtcaacttcataagtagatgtaaacgttactgtattttgatttttgtagttattaccaacccagtgtagtcgattccattgattagtatatctatccatttctctttggtaagttactttgattttagatttttttgtatcattttgtttatgagaaagtacgcttataaattctgggttaaagttaccacgcgccaataaaggcatttgatgtgttggcaagaaattttgaccagcatttgaactactttgtctaccgcctaaaaacagttcattaccatatgttgggtcataactatctctaccatatggtccccaaccattattcataattttgtgcgcctcaacaccccagccaattgatttatgatttgtttttctatcaatcgtagttctgtaactttcttgtttataatttatcgtttctgaaaatgattttgatccatttaatccacctgataagccattagatatattaatatctccgccataagaataacctaatgtttgttgaacttggaattcttcattttgatttttaggtgcatagtcaacaacatttacagcatcatttgattctgaactaaccgaaacattatacttaccgccccaataaaactgtgagtaattgtaatcttttggattaggctttttataacctgaattaatgtttccggctgccttaagtactaacgtatctttgtcataacttttatccttaatgaaattaaacgttaaaatttgagaaatattcaatttatcattatcagatgttgctgttgttttgtataaagtgattttgtcatctacttttttctcgcttacaggtgtgatatgttgagctgcatcaactgtattcgatagcaaaagcagtgcaattgatgaagcaactgatgatttgactaattttttcattttcatattaattatgtcctttcactttaatttcgtgtgttttccaattaacttcatatctaactacaaagtttctatttacaaatgcattatgctttctttctgcgtaaataccagttctagggaataaagtcgcatatgtaatatctaagtttctaccatatgaaatttcaaattcactcgtatcacttgaacctttttcatgtgatagtgtagtgataaacgatggattaaagccactttgaactaaaggtggcaattgattatcaggagcaaaatattctcttgctgaacctgttggaccatttggactttgtacgaataaatatctatcatgcgcagatttttttccatcaggcgtaacaaattcgtttgctttaacaccccatttaacagattttgagttttgcttgtctacttcactgacataactcttttgggtataactaattgttttagaataattaaatgagccattgccacctatagatggtgctgactggaaattacctccaatgttatatcctaatgtttgaccaacatcagtagtttctattttgtttttaggaaggtaattgattaagctaacatttggatctttagtcgtcagtcctatattatattggaatggccaaatcattcgtttagttaattcatatccactacccttcacatctgaaaatgaagttctggaattaataaaaccttgcattttaacaattaaagcgtctttgttatattttttatcttttacaaagtcgaattggacattttgagtaacgccccatttcttactacttacatcctccgtacgtttgattacttcagcaccatcaccaatattttcaatattagtatttgctctagattcttgaatcggagatgctaaaggtgcaatcagtcctactgacaaagttgcagctaacatttttttcttaaacataagtttcactttctttctatataaatttttaatacaaatttattctagattatttcacttatttataaaattaactgttcattaaaaaataaaatgctataaaatattaaaaatgacacaatttattcatttatgctgctgaaaaccggtcattttggcgcaaccttcattacctttaaatagttccctttatattcgaacaatatgataaaattaccgatactcaatcttttctctgtaaaaataaaaacgactttaatcaaatcttcaaaaataatgtttgtattatcacaaataatctataattgaatttaaaattaactgattattaactattgtccgttaaacgaagatgattacttcgtatactgttataactgaaatgttctatatatcatttcgtaatatcgcttacttcatctaaaaaaatttaatgctatgatttagtctaattaaaaacatatatatatttactatgaactaaaatttcactttaaaaataaaaaaccatgatttcgaagtcttcataaactgaagcttctactctcatggcaatttatactatgatattcaattataatgcctagtctcatagtaaacggctactacattcgcatgtacttcgttttactgtccacgcatggtcgttgacttatttatattataatataaatattttatttttcaatacttaattttaaaaatcccctatgaaaatgttgatgagctacatctttaaatcttattatacattgtataaaattatattgcgaggtagtaaattgatattatacacttttggttgcgtatgcatctcacctatcttttttgcttttttcaaataagaaagtattaaaaattaatgcctatacaggaacagacatggctaaacttgatttaaatagtcttgacgacgagcacgtaaaattattaataaatgaattaaaatatccagaaactcatatcgatgtaaatgaattaaaaacaatagttgctagtcgaataaatgaaaggcaagaaataataagttttaagttaggaataaagtacttattaacaataaaaagagggaacatagaaaaagataggttttcaatttcaatcattttcaaagatacctatcacaccctagttagaatagatattaacggtggtactcacgataatccagatggaacaatcgctccgaaaagtcatattcacatatataatgataagtatgataaaaaggataggtttgcttatgaaattaacttgaaagatttccccgacatctataacttgtataatgtgtatatgtcgtttttagagtataataatataaaagaccttgaataaaggagggataatatgactacatttgatgctaaaaaattaaaaaaagaatatcttgattggtataatcagaccttagagttttctaatttatcaaacaatgtagtaagaatagatactccttttaaagataattctttagataatttaataatttacgctttatacgatcagtccagagacatgattacactgacagatgacggctatactatatttgatttagaaaataatggtatttctttaaataaatcaaaaaaacgtaaaaagatttttgaagagcacctttcagcttacggtattaaatataacgataaaactcacgaaatttttgttcaaactaactttaaaaattttaataaatcgaaacataatttattacagtgccttatatttgttaatgatatgtacttactttctaatcctaagtcacagaacatatttacagaagatgttgcaaacaaattggatgaacataacatttattacggaagagatttacctattataggaagcagtggtgttgttcataatttcgacttttttattagcgctaagaaaaatcaaaaagaaaaatttatcaatgctatttctaaccctaataattctatgattattaagtcgaaaataacggatgctatgcaagcaaaaaaataaaaagacacaggcaaaatgagtttatttttattttaaatgactcaaaaaaagaaataaatgaacataataaaaatcttcttcatgaaaactatattagtacaatagattatagcgaattagatgaaaagataggtttattgatttaatatatatagacgtgataatatcaatgtttatattaaatgaaacgaatttgaaaatttcgaaacagcttaagatagcaaattgaatagccttattgataatgcagaatcgtctacacttagttgaacaaattctatgagaatagatattgttaaactatttgggtaggcgattttattttgacaagagtcagaagattatttagttcatagtttaagttacaaatggctaaactttatgaaaatggtatgactagaatcgaaattatactcgaatacgatttaacactctcaatcttctcgaactgaataaatactgggtcattcaatcatcaagacaacttaataagtgatgataaatgttcataccattttgcaaatataaccagatactctcaacaaaatgtagagttcaaaattaaaaatgtccctaattggcacattgctgtatgataataaattcaacttagatttcaacaatataactaatgatgcttatatttaccgcgatatcaaaccaaacagcccatccacaaacaaattagaatatatcatgttaataatagtaaatgatatatcttccaaagaccgcaaactgtagcagaacatgagaaccttgcgattttgaaatggtctaataaatcaaatatcattgaaactttaatcacataaattaacagtagtcacctgttcgcagttctataaattacaaatgcaataaaggctaaagtaaactaattactttagcctttattaataatttagtcgaatttattaaaaatcgactaactcctggttatgctacgctttactttataatccgcacgtagatgccgattgattatattataatattattattttattttttcaagcgtatatataatatttgattttctttaagtaacagctaaacattacatttcaaaacgattaggtcatgcagatgtacatacaacgcttaaaacatattcacatttgattaaagaatttgaagataatgaaactaaatttatagaaaaaaatctgaatgatttgttttgtgactaaacttcaaaatcttgtgactaaaattaggattattcatcaaaaattagtcacattgtggctaaaaaattttaaatggatataaataaataagaagtgtaaaaatgaggataatagctcaaatgcagatatatcaagggattgagtccaaaataaaaatagcgcttaaaatgggtaaaaccaatttaagcgcctttacggaaggtaagggattcgaacccttgagacgcttgtgacgcctacacactttccaggcgtgctccttcggccagctcggacaaccttcctcaacaataaatatgtaataaaaaaacagaagcgatatttcacttctgcttgtatgactcctacgggactcgaacccgtgttaccgccgtgaaagggcggtgtcttaaccgcttgaccaaggagccatggctccacaggtaggactcgaacctacgaccgatcggttaacagccgatagctctaccactgagctactgtggaataatagaaaataatggagcgggtgatgggaatcgaacccacaacatcagcttggaaggctgaggttttgccattaaactacacccgctaatgtaaacgattatggggcggctgaaggggatcgaaccctcgaatgtcggaaccacaatccgatgtgttaaccacttcaccacaaccgccatgaattaagaatggttcaggacagagtcgaactgccgacacatggagcttcaatccattgctctaccaactgagctactgaaccgtaatggtaataataatggcggtctcgacgggaatcgaacccgcgatctcctgcgtgacaggcaggcgtgttaaccgctacactacgagacctattaaattaaaaactatgtattgcgggaggcggatttgaaccaccgaccttcgggttatgagcccgacgagctaccgaactgctctatcccgcgctaatattattttgaattacctaattaatataccataatcaaaaacctaaagtcaagaactttttgaatttaatttaaatgttatctcttaaataattacttaaatatcgtagcaacatgttctctgttgaacacaaatattagtatattcatttttgtagtgtacgtcaacgacattttcaaagttttttgtgtaaaaaaacgcttcttattcccttttatcatataagtgtctaatagttgtcataaatagtgttaaagcatttaaaaaggtataggagttataaagtttacaacgcctataccttctgaaaaagaaattataaaagcttgttacaccgcatattctttcagtcagcgactaccaatataacattgtagccctaagacattgcttgacgcctcaattacaacaatttttcaaaatcagcagctacctactgacacaacataacacaacccatacactaactatcgtgtcatgtaatcttgcatccgatcttgcaacgctgtaaatgtttcgaagccatcctcttctaagaagtgccctccatcttccacgattcgcaagttcccctctaatgcattcattaaacgctgggtctctttatatgaaacgtatttgtcatttttagaactcaatccgtaaaaattgtcaactttctttttaatattatcgtaatcaatggttacattacttaaatcaatatctaaatctatattttctgcatcttctttaaagcccgctatactgaaaaagccttcaatcggctgatcaatcatttcaatatattttaaagctgtgattgaacctaaaccatgtgttacaaaatatgtatcctttttgcgtacattaatttgtttcgtcatagcttcaatccactgatccactgtcttcgcttcaggggattcaaaattaaataatgttacgtcatatccttctaaagttaagttatgctccaaccactgataccaatgatttctactatttccatgcatagaatgtacaataattacatctgtcatctcattctctcctttcaacttactacttcttttctatttttaaaaaaatgactgattacctataattgtaaaataaaaacaccttaattagaaatgttatatcgcaaagtgacatttctaattaaagtgtattgtcatcatttcaatatcattcaaaaacagctaaacctttgtctctgcttcaatttcacaaaaataattcccgctgaaagtatctatatttacacattacttccaccattatataacttaaaaatgactatatttcatcaaacattatctaaaggcgtcgcacctacaccaacaccatccaacaattaacttacaactctgcgattacttcttcagcagcaactttaccttgcgtaatacaatcaggtagtccaaccgcttcaaaagatgcaccagttactctaagtcgtggatatgtttgtttaatatgtgcttgaatctgtctaatttgttgaatatgaccgacatggtactgtggcatacttttcggcaaacgattgacaattgtaaattcaggatcacctttaaatgtcatcatttgacttaaatctctacgtacaatcgatactaattcattatctgtatgatcatcaaccacagtatcacctggtttacctacatacgcacgaatcaaaaccttaccttccggtgtagtaaatggccattttttcgatgtccaagtacatgcggtaatgtctgtatcactcgttctcgcaattacgaagccagtaccatcatgggtattttcaatgtctttttcatcaaatgccaatacaacagttgcaacagtcgtactatccatcgttttaaagtaatcaaatgctggatcttgtccgaaccaatttaaaaacacttgatgtggtgtcgttactaatacgccatcatacacttcttctagttgatcattgtaaacaattttatattgtttttgagatgtaattatatcatccactgacgtattgtagcgtattgtcacacctttatttttaacatcttgttctaatgcttcaataaatgagcttaaaccatgcttaaattgtttgaattgtcctttcggtgcgccaggatataattgtctttgtttcagacgcttatttttctcatccttcataccttttatcagacttccgaatgcctcttctttttctttaaaattaggaaacgtactcatcaaacttaatttatcaatatcggtaccataaataccacccattaaaggctctattaaattctcaagtacctcattacctaatcttgctctgaaaaatgcaccaacagaaatgtcaccatcctgcatttgagtaggtttttttaataaatcaaaccctgctcttaatttaccaagtggcgatattaattttgtagtaacaaatggtttaatatctgttggaatacccataattgaaccacctggaatcggatataatttatttttcgcaaaaatatatgattgtccagtcgtatttgtaacaatatcttgttctaatccaatatctttcgctaattctgtcataatcgtttttctacctaaataagattcaggccctagttcaatcatataaccatctttacgatacgattgaatctttccccccggacgattcgatgcttcaaagatggttacatcaatattaggatcttgctgttttaaaaaatatgcacttgataaacctgttatccccgctcctataatagccactgatttagtcacaacgtttcacgcttctttcgtcattaaaatatagacttgatttcatcaacaattgcaccgataaataatggatgtgtattcggcatttttggacgataataattcgcaccaatatcatcgcaaactactttacattcataatcattgtcataaagcacctctaaatgctcacatacaaaacctactggcgtatatataaagtttttatactgatgtttttcatataaatcacgtgttaaatcttgtacatctggccctaaccaaggtgtacctgtattaccttcagattgccaaccaatcgcgatatgttcaatattagattgttctttaattaaaagcgcagtatgttctagttcttgtggatatggatcattattcttttcgattaaaccttttggcaaactatgtgccgaaacaactaataccgtgtctttatgttcctcttccggtatttgagctaatgtttcgttgactttattcgtccaatattcaataaatttaggttgttcataataatgtttcacatgtgtaagttgaataccatattttgcagcttcttcatcagcacgtttgtcatatgatcctactgaaaatgaagaataatgtggtgctagtactaccgtgattgcttcagtaatgccatcattgtgcatttgttcaaccgcatcttcgataaatggtgaaatgtgttttaatcctaagtatagtttaaattcaacatctgcatatgctttatttaatgctgaaactagcgcatcagcctggtcatctgttgtacctgctaatggtgataaaccacctataaattcatatctatctttcaaatcttgaagttcttcttcagatggacgtttaccatgtctaatatctgtataatatggctctatgtcactttctttataaggtgtgccataagccataactaataatcccatttttttagtcattgataataccttcctttaaatgaattatctttcatgtgcttcaatgtaaaactatgattatctttgtgtatatgtgtgtacgaattcgcttactttacgtaacgtctctggttgcacttctgggaatacaccgtgtcctaaattaaagatgtgtttaccgttctccataccttgatctaatattggtttcaatctctcttcaatgacattccatggtgctaataaaattgatggatctaaattcccttgtaatgttttagtaacgcctaattgttgagcctgattaatagacgttctccaatctaggcctaatacatcaatcggtaaatcattccattcattgattaaatgactggcacctacaccgaataaaattaccggcacatcatgttttcctttaacctcactgattaatcgaatcatatgtggtttaatgtaacgtctgtaatcctcgacatttaatgcacctacccatgaatcgaaaatttgaatcaattcggcacctgcttcgacttgagctgttacatatttaacagatacatcaactaaatgattcattaaagcaaaccatgttgcttcatctctatacatcatcgcttttgtaaaattgtaatttttcgatggtccgccttcaatcatatatgacgctaatgtaaatggtgccccagtaaatcctattagcggcacatttaacttttcttctgttaaaagtttaattgtatctaatacatatggtacatctcgttcggggtctatttgagaaagtttctcaacatcttgaattgttttgattggattatgaatcactggaccaatacccgatttaatttctacatcgacaccaattggctttaatggtgtcataatatctttgtataaaattgctgcatctgtatgataattatcaactggtaaatgtgttacataagcgcacaactccggctgatgtgtaatatcgaatagtgaatatttttctttcaattttcgatattctggttgcgaacggccagcttgtcgcataaaccaaacaggtgtatgtgatgtttcttcacctttgatcatttttaaaattgtattgtttttattatgcaccataaaggcctcctaaattaaaatcattcttatctatattatcatatcgctcattcgttcgtattttcaataaataaatgtcataaaactgacatttaatcatagaactatttattgtaaatttaaattctaaagtccattattttgtatcattacttctaaatatctcgcaagattcattatagtaattttaatcaattattaatagtggtaatgactagtttatcatcgtataataaataaaaacataagggggacctttcatatgaagaaactatatacatcttatggcacttatggatttttacatcagataaaaatcaataacccgacccatcaactattccaattttcagcatcagatacttcagttatttttgaagaaactgatggtgagactgttttaaaatcaccttcaatatatgaagttattaaagaaattggtgaattcagtgaacatcatttctattgtgcaatcttcattccatcaacagaagatcatgcatatcaacttgaaaagaaactgattagtgtagacgataatttcagaaactttggtggctttaaaagctatcgtttgttaagacctgctaaaggtacaacatacaaaatttatttcggatttgctgatcgacatgcatacgaagactttaagcaatctgatgcctttaatgaccatttttcaaaagacgcattaagtcattactttggttcaagcggacaacattcaagttattttgaaagatatctatacccaataaaagaatagattcgaagaaaacttccattggttatgctgttaacgtatagatgctaatgtaatctgaacgccgtatcatttggcgttcaacattacatgcacctttacaacatacatgccaatggaagttttttagtctcgtaataatgtttcctgatatttcaactttttaataatacttctaatcgttaataaacctacaatatagaaaatgagtacaacatagaataacgtcatatgttttataataaatgtcactgcaaacacagtacaaataacaaacattaatctatataaaaactgttcataccctttgattaccttctcttcaggtacaggccacacttgaggccataagccatatgcttgctgtgaataaaattgtgccatttgtaacaatataatatatacaaataaacacccaataattgctgtcactaatggatatgataaccaaaccattaataaaactgcaataattactaacctaaagataatattaaatgcgtctctccctcttataaagcttctaataaataagaataaatacatcgcattagagttaaatttactaccctttggaactggtaaaagtatatctagataacttcttctgactgcagattctttcaaatgttttacatcggtgaacatattaacaaatttataataattcatatgatgtcgatgttcgattgcaatcattttctcccaaggatacaaaaagcctggtttatattttttaactaaaaattctattaacacaggcaaagcaaccatcacaaatgcgatgtaccattttggagctaatagtaagtaatatgttagagcaaaggtgatgaatgatattaaattaacttgccatgttttaagtcccgattgataccattgccatcttaagcgtaaaccaacatatggaaaaattaatgcactgactccaaaacaaatataaaatgccacattatgttgattaatattgtaaaacaacgggaacattacaataacaataatgagttggattaatatgcgcgcaaagtaactatataaaatcgcatgacgcataaattgagacatgtgtttttcaaatggtaataaaaagattttatccgcttcttttaacagtggtcgcattggaaaaatagatgtcaacgcaacaatcactgctgctattaatgaaaaattgatattcgttggaatatgttttaaccattcaccatatccaaaaataaatgcacccagcaaaataagtaaaaagaccatgaaatgaccattaaatataaacttattataataatttttctctttacgaagggcatgtaatcttttattaaataatgtggtagcttggttacgcatgtacatctccaccttgcgtcacatgaatatatatatcgtctaatgtttgattatgtaagccagtttgttgtctcaatgcttctaaatctccaaatgcaacgacttcaccttcgtctagtatgataaaacgatcacagtaacgttcagctgttgctaaaatatgtgtactcattagaacggttctaccttcgtttttcttttcaaccattaaatctaacatggattgaattcctaatggatctaggccaaggaatggttcgtctataatatacaattcgggattaacgataaacgcacaaataatcatgactttttgtttcatccccttagaaaaatgactcggaaaaactttcaactcattttctaaacggaatgtctttaataatggcattgctcgattcatcgtttcatcacgatcaatatcatatgccattgctgtcatctcaatgtgttcctctaatgtgagttcttcataaataaccggtgattccggaatataagataactttcttctataagcctctatgtcatcattaatgttgatatctgaaattgatagagatccttccataggtgtaagcaatcctagcatatgtttaatcgttgtactcttaccagcgccattaaggccaataagtccaacaatttcgcctttgtttaattcaaaatttatatctttaattacagggcgttttccatatccacctgtaagctgttctactttaactgtcataaggcacctccatgacttatattgtaccaaaaattataaaatgctcatattaaatacacatgtcctaatatcgaatttttagcgacaatgttataatgaatggtaatactagttgaaaaggagtgtagtcatcatgtcagaaacaattttcggcaaaattttaactggagaaattcctagctttaaagtatatgaagacgattatgtctatgcctttttagatatatcacaagttactaaaggacatacgttattaattcctaaaaaagcttctgctaatatctttgaaactgatgaagaaacaatgaaacatatcggtgcagcattacctaaagtagcaaatgctattaagcgtgcatttaatcctgatggtttaaacattattcaaaataatggtgagtttgcagatcaatctgtatttcatattcatttccacttaattcctcgatacgaaaatgatattgatggatttggttataagtgggaaacacatgaagacattttagataacgatgcaaaacaacaaattgctgaacaaattcaagcacaattttaaatgtatgcttaatctaagctcgaacgggtataatatgattaatattataacaattgcgtttgaagtgataacatcaaggttagcaattttaaacaaaatgagttatcaagataacagatgttaaaagtgaggagaatataaatgaaagcatcacgcattctattcggtatcggtgttggcgtagcagctggttttgtagttgcacttcaaggacgtgacgacaaaagtgtcaagaacaacacgatcgatcgtactgcccctactggttcaaaatcagaactacaacgtgaatttgaaacgattaaacaaagttttaatgacattttaaactatggtgttcaaattaaaaacgaaagtgcggaatttggtagttcaattggtggtgaaattaagtcattacttggaaacttcaaatctgacattaatcctaatattgaacgtttacagtcacacatcgaaaatttacaaaatcgtggcgaggatattggaaacgaaatttctaagtagcaggttacgttctcgatcacaactatttttattagtaacagcatatttattttttaaaattaaatgccaaataaacgagatgacattagaaattagatatttcttgtcatctcttttttaaaactcaaatgaacttatgtttacaaattataggaagacattgtttgtagtgattttcgcttaaatcatatttatgaattgattgaaaacattgcttaggattcattgtgttatccttgcactttgattacgctttacttaaatcattatcgacaaacaacatacttatattttcattgagccgaaccttatatacacattacatataccttacttgcacaaattattaatctggtgtttattataattacatatcactatatttttagcatttgtataacttagttggtcaaaagatgcttttgcatatgccctgccatatccattttttatattattcaagttttcaaatactcatgtcacacgcgcctttttcataagtgatgctttattagcaagaatatgtgttcgcagaaatttgttctgcattctacttctacgctagtcaatcagacaattttaccaatccccactttcgcgtttcaaatcaaacaatacgtcgctcctttcttcttatataacaattcttctaacatgatatgttactattgaattactgaacctgagttagttataatctaacttatattgaaaagagatgaggcgtaagatatgtttttatgtaaaagacaaattgatatcaatgcacgatttggtttgcctagaattgcatttatgagtgcagttgcaaccatcattatgtttttagttagttatgaagtaatgtattttttatctaatacgccattatcagatagacattttctcatctttttattacttgtatttatgacgtatccattacataaaagtatacatttattatttttcttaccatatagaaaatcgtttaaagttcataagttaactaaaagaaaatggcttatattctataatacctacgtcaatcaacctgtacacaaattttatttttgcattaacttaatattgccgttaattatcttatctgcaatgttcgtttatctaacaatttcattcccgcaatatggacattattttatgttcttattggcattgaatttcggtatttccattacagatttattatatttaaaaataattatattttctaattatggacaatatatagaagaacatagtacaggtattaatattttgaaaaaaattaaaaatccatatcatttataacaaaataattatagcaaggtgttattatttgtttttaggctatgtaatagcttacaatcaaatgtatatagaccttgtttttttattttcatcaatttctacccctaaacctaatgctctagtctgatgtcatgggttattgattggtgataatataaaactatgttatattcacgatgattaacttacaaaggagtttcaactatgaagatgataaacaaattaatcgttccggtaacagctagtgctttattattaggcgcttgtggcgctagtgccacagactctaaagaaaatacattaatttcttctaaagctggagacgtaacagttgcagatacaatgaaaaaaatcggtaaagatcaaattgcaaatgcatcatttactgaaatgttaaataaaattttagctgataaatataaaaataaagttaatgataagaagattgacgaacaaattgaaaaaatgcaaaagcaatacggcggtaaagataaatttgaaaaggcccttcaacagcaaggtttaacagccgataaatataaagaaaatttacgtactgctgcttatcataaagaattactatcagataaaattaaaatctctgattctgaaattaaagaagacagcaagaaagcttcacacattttaattaaagttaaatctaagaaaagcgacaaagaaggcttagatgataaagaagcgaaacaaaaagctgaagaaattcaaaaagaagtttcaaaagatccaagtaaatttggtgaaatcgctaaaaaagaatcaatggatactggttcagctaaaaaagatggcgaattaggttatgttcttaaaggacaaactgataaagattttgaaaaagcactatttaagcttaaagatggtgaagtatcagaggttgttaaatcaagctttggatatcatattattaaagctgataaaccaacagactttaacagtgaaaaacaaagcctgaaagaaaaattagtcgatcagaaagtacaaaaaaatccaaaattattgactgatgcatacaaagatctattaaaagaatacgatgttgactttaaagatcgtgatattaaatcagttgtcgaagataaaatcttaaaccctgaaaaacttaaacaaggtggcgcacaaggcggacaatccggcatgagccaataacacaaaaccgagcgaccgtggttcaaaaatcataccacggccgctcggttttttcgcattaaaaatcggacagatgagctcatgtttcagtatactcatctgtccgatatcttttaattcttaatcgagtgattcaggattgtagaatctacgattttcaagaccaaatattttatctgtaaactgacccttgtcagtttttttatatgccttttcaaacatattcattctagcatcgatattatcgatatagcataaaatttctgcttcttttaagtatggcagttttggagaaccatactctaacttaccatgatgagataaaatcatatgtcttaacaacatgatttcttctccttcaatgttcaattcacgagctgcttcaactacttcatcactcgcaatcgagatgtgtcctaataagttaccttcgactgtatacgacgtcgcaacaggaccactcaattctctaactttaccaatatcatgcaaaataataccactatataacaaacttttgtttaacaatggataaatgtcacaaattgattttgcaatacgtaacatcgttaatacatgatagcttaagccactcgcaaagttatgatgatgagaactagcagctggatatgtgtaaaatcgttcttgatattttttcaataaatgacgtgtgatacgttgtaaattagcattttcaatatctagcaaataatgagaaatctcttcttgtatttctgccggtgataaaggtgcaccatctacaaattgttctgtttttaattgatcttcagttgtcgctagtctaatttggttgactttcatctgtttatttccgcgatagtttatgatgtcacctttaacatgtacaatttcttcaggcttgattgttgccatatcattttttgtagccgtccaaaatttcgcttcaatttcaccacttttatcttgcaaatgtaatgtcatataatctttaccttgtgctgttacaccctgtgtagctttatgcactaagaaaaagtgatcaactgaatctccgggatttagattctctatatttctcatcgtttcccgccttcctctattttgtttaatgtaatcacttcttttgatggaacaatattatcttttacacatgtaaagtatagtacttgatagtgttctgataatgatcgtaaataattcaacattttttcagtacgttttttatcaaaatgaacaaatgcatcatcaacaattaatgggaacggataatatggtcttagtaccttaattaaactgatacgtaaagctacataaagtaattcttttgtagattgacttagttcaacaggatcatataattgaccattaacatgtttaaccgtaattgaatcttcattatagttaatcatcgtatatctgccatctgttaaatgcttcaatatttctaccgcttcattaataacttgaggcaaacgtttatctttaatttgtttaatgtgttcatcaactaaactttgtaaataacttaaacttgcccaatcttttgcgatatcattaagttgatttttaagactgtgatattcatgtcttaaattagcaagcgttgtatcagtttccatgtgattgatttgtgcacttaaatcactgacttgtgcttgcatttcaagatattgctcattatattcgtcaacttgagtagccaataaatgatcttcttcttcaagttgtgcagttgttttttcacttaaactagaacttaattcataagaatagttttggttctcaagatatttagttaaatcattaaaacgactcaaattactagtataagtttggtaatcttcatgatgttggtaaaaatcttcttcagtaccaacattgataaaatcgaatagtgctgtaatttctttattattttcttctaattgagcatttaaatgatttaattcatttgtaacaagtttggtattttcagcattaatacgccatttttcattcgtgtcttcagctgatttcaaccattgttgcacatcgtggaataaagataatttgttgaaataaacaaattgtgattttgtaacagcttcagcatgattgtagaatgtatctaattcttgaaccaattgctggcgttgttgatttaaatcactgatatgttgatctaatgctttaatattcgccattgtagaaatactatcaacaattaaatcatttgaaattttagatgataagtataattcatccttaacgttctcaactgtcgattgtaattcatcatgacgccctttcgcatcatttaaacgaccttcaatatactgacgtttctcttctaaaatatctttatttttcaaagcttgttgccagtgatcacgaatgcgatattgctcatcaagatcaaaatctaagtcataattttcatctaaaatggctagttgtgctttaatttcttcgatttcatctgtgatggcctcgctataatctacttcttttgatttagacatgatgataccgataacaaatactaaagttaatactgcgaaaataataccaaacaacatgttgtttgaaataaatgagaaggcagttaaaccaatacctactaatgttaaaagaataaacgttgttcgtaacaatttttgacgtttttgtttttcttgttgctcaatttcgaaacgttctttcaatttgctatacaagttctctttttcgtttaattcaatgacttgttgtgagtattcttttttcttttcaaaagtctcttcaggaactattttttcttcaacagaatctagttcgctatgaaccgcattatcttcgattttattttcttctaaactacgttctaattgtttaatgtatgcagcttgttcttgtttattcttgatttgctcactgacataacttttcattgcctctgaactatctacgtcatgatgcgtttcagaccaaccaatatttgattgcaattcatctttatcacgttgtttattcgcaatatccttttcgattgcagtaagttcaaattctttatttttaatttcattttcttgttgattcaaactaatgaaggcgtcaatatcagattgtttaactggctctaattgagtcgcttcttctttaagttgagctaaacgctcatttcttaaaccaatatctctttctaacgattgcttatgcgctcgtgctttttcgtaacgatccacacctttttctgggaatgtgattggctcaatatttaactgttgttctagagacttccattcttgtgaatgatcatgtaaagcaacctctttttgtttttcttcatgcatttttgataattgatttaaattatgctttaaattctctaatcgacgtgatgatttatctcgatcatctactaagcgatgatatgtttctagctttgcttcttcttcacgaatttgactttctagttgttttaattgctcaatttgttgattaatgatcggatttttacctgattttttatataattcatcttttttacgattaatcacttcgcgcattgacgtgaattcagttgatcctaaagcccctgcttgtaataaataatcttgcaattgtttttcatttagatttctatgaatgtcttgaagccctagtacatcaaatgaaaagataccttgatatgtctttttagaaatataattaagtttcttttgtaaccaagcatcatcacgcacagcaccattaggtaaatatactttcacatcaccttgagcactgcctttaattcgttcaacttcaatctctaagccatcatcaagaataagtactaatttaccaccgtattggttacctagacgtggttctagtcttggctctttagactttttagttggaaatccaaataatatcgaatggatgaatgcttgaatcgtcgatttacccgcttcattttcaccaaaaatttcagtgaagtttttattaaattcaattttacgttgaacaaattgaccgtaaccataaatttcaagtgatttaattatcattttgttcacctctcatttcagcttttaatatttcttcagcacgattaactaatgctgtatggtcgaatgttccataatcgtctaggaacttagatgcccttggatttaaatataaatctgacatcgctttatcaaaaacagtttgatcgactaataattccgctgaaaattcattaactaaaggtgactcatcattttgtgcatattgtatttttaactcatcaatatatacaaattgattttcgttttcttcataatctgtaatcatttcttcaacttgtaataaatcttgaggtgaaattaatgtctcactattaataacaagcgttaaacgataaaaggcttttccttcttctctcacttgttctttaaagttttgaatgacctcgtataaaccttgcttagatgtcttatccgtttcaatagttgcttcttcaaatctaatatactgtgtaggataaaatttagtctttaattttaagtggtcaccctcgattaataagcaacctttttcaccttgctcattaaaatgtctaccttgaatattacctgaatagttaattacaggcatatcacttaattgttgacgttcatgtatatgacctaaagcccaataatgatacaatttactgtttaaatcttctaaaatgaactcggtatatctttcgttaactgaagatttactatacgtaccatgcaagacaccaatatgtatgcctttttggccttgacttgatggatattcatcaatcttgttctcataacttgctctattttcataactaaatccgtgaatataaattgtttcaccagatttagtaattgcttcatacgtctcaactttatttgaaaatacagaaacattatctggccagtttgatgaaatctttgatgataaaggatcgtgattaccatgacaaacataaacaaagatttgttcattttgtaaacgttcaaattgctgttttaagaaaatttcagcacgtaatgttctgttttcactatcaaataaatcacccgcgataattacaaaatcaacatcttgttgtaatgcaatatctacaatatttttaaaactttcataagcacttttttgaacatcctcaaaaattttagggcttatatgactcttagatttgaaaggactatctaaatgtaaatccgaacaatgaataaatttaaccatacatccatatctccttaattaaaggttctaacatcaattttgcaaaatccaactatacaaagcattctaatcactatattcatacttataggtgtagtgattcattagctgatttattaaaaccagtcgccatttttatttcgttaaaaaactattatctacacaataataaagtgctttagtcaaatcgtgatgttttatttattaacaagtttattatttcttcattttaccataatacgcttcatatcgtcgatgaacatatgaaattgagacacatttataacagtttaaaattttatttgtagcgtacgttgatatttttcaaaaatttcagtcggaaatgcaatttccgtagttattaacaccgctagtgaatcaaatggcacattaaagatttacatgattactctactagatttgctcggcagtaatgaccaattagaaactaaatgtcaaaactatcattgcacttaatacgccaaacattttcaggccgttcttaatgagtcattaaaagtgaaacgcttttccatcagtccgatacatgaccgaactaatagtattatgttgaaaactttacacttcaaaatgcaaaaaggaagttaggacacgtttactagcctaacttccgttactgaatgcatctgcccaatttgacagagagcctctaacttccgttatcaaaactaaaaaaactacccacaaagtctcggactctgtcggcagtctattcctctatttaaaggattgaaaaatattattttaatattagtcagcgtaaatttcgtctaatggtttaacgataatttggttgatttcttggaatacttgactcattttttgttcagcattcattaatgcagagatgttttcatctttttcaattgcttgcgcttgttcttgcgctttttgtaaatcttcttcagcaatttcttcaccttgcatttgtttttgttggaagttaatttgagtttcacggaactcgtcgaataactttttagattcttcgttagcttttacattagcgaatgcttctttgattgctttgtattcttcgctttctcttaaagcttgttctaattgatttgcataatcatataaatttactgccatggttatagcactcctttgttgtgatgtttattaaaacgttcgatattactttaccacatctcgcttttttagacaaagattgcaaccaaaccttggaaaaatccaataataccacctaaaatgaaacctaatgacataatcaactttagttctttgttagcaatttctataattaatttttcaatataatctaagtcaaacgtattaatttgttcttcaattaatcctcgtaaatccacttttttcataattgtagataagtgaatcgataatttttcaatgattaaatttgctaatttgctagagagttgaccttctaaataatcaacgaattgaggcattaacgtaaccactggcttattcgcttgtttgcttgcatatgttgttacatacactgatagattttcagcgatttcattaaactgcgatgcatctaacagttcattcaatggtttatctttaaaagtttgatattcattggtaattaacgatgtcacaattgttcttgctttaggatgagatgttaaacgtataagttcttgttgaatgcgatctgcaatactctcttttgtcataaacatttgcaacataccaattaacttacctttctcattgaaaaaagtatccaacatatcattaatatcttgtgtgccttttgcagatgataaataattccttgcacgatcacataataagtctgttgcgttatctacatgctgatttaaaaatgttacaagttgatttggcaataaagatgctattgtttggttttgatgctttgtataataattattcaattgtgattcaatatattgatttccattagtttgtaatacttgttctaaatcaatatcgatttgagaagtaatttgttttattgacaattgatctttcgtcaacttttgtaactgctgttgaatcatagattctattgcttgctgtgattgctcgcttttcaatttttcattaattaaagtttctgtaagcaaatgctcttcaatcacttggccaattttagttgcaatttcttcgcgtcttttcggtattaaacctggtgtaaatgggactctaaatttaaatatatagtatggtttaaaggggtgaaacagcattctaattgcaattacattagtaatgccaccaattatcgcccctactacaatcataaatatgataataaatagtgcattcataattttgactcctttgtgacaacatagttattcattataccactatttttattttttaattcattaatcatttcactttctgctcaatttattattagtttacatacaaaaagcgatgcctcacctctcgaaacaggtgtgttacatcgcttttattatttattaaaagtatataggcctagatatgtactaattcttctttagcatttctgttaaagtatgtttcagcttctctcattttagaagtaccgaaaattggttggttatctggatttaatacacgataaatattgcttactttgttactttgtaaaatgtacccattacgagtctcaatgttattccaataaatatcacttgttggtgcatggtttggatatgcacagtgatttcttgaaattgtttgaacgatttctaatggatcacagccaaatgtactgtttaatacttcagagtctctgaataatgcacaaattgaaatacaagttgtccagtttggtaatactctctctttttcgatttgtactaaagtctttttagaaagtccaattgtttgcgccatagtatcttgcgtataaccagcctctatacgaaccattttaaattttgtttgaattaaatctgtaaaactctgtctatccattctgttatctacctttctgtttggggaattttatccggacacaagaaattgcaataatacacatttcttgaaacacagattacatcttaatatatttttaataaaatgaaaagagtcaatttcacatttgtattaaattttgatcaagtcaacaagagttaagtttactttataatgaagcgaaagtaaatgaagtaaatttttatgcataatcactagatttgataaaacttacacttttataatgatatcaaatttacaaagaaaactgtataataaaccctatcgctataaaaaattcatcaaaatcagattaaaaattgtctatttttcgacaaatatttaaaagctcattctaaatcaacttattttccattgcataaattgctgcttgtgtacgatcgctaacttgtaatttactaaatatatgactgacatgtgttttaattgttttttcagatacaaataaagtttctgcaatctctttatttgttttacctttaaccatttcacgtaacacttcaatttctctctttgacaacttattcgtgtagtgtggtttttggctaactgtttcgaatacatcttgtgccttaggatgtatcattttttcaccgttcataactcgtctaatagtttcaattaattgctgaggctcaacgtctttcatttcataaccatcagcacctttattgattgctgaaattacatgttcatcatcaacataacttgttaataccaaaactttaatatccggataatgtgccttaatatattccgtaatttcaataccattcatgccaggcatcactaaatctaatagcacaatatcagggtgctcatgctcttttaaatattctaaaaatgtttctccatctgcaaagtcttgtaaaacttctatgttttcaatcgtggataataaaaatcgcaatccttgtcgcacaatataatggtcatctactaatattactttgttcatgggttatctccttaaatcaagctattttataggaattgtgaattgtatttgtgtaccctttgttggctgagaatgaaaggtcactttacctcttaataatttaactctttgttttatgttattaataccgtgtgatgaagctatctgaacattatcgatctcaaatccttgaccataatcaatcacgtcaatatatagtatatcgttcatttgttttaatgtaagatccattttattcgtatcagcatgtttcttaacattattaatacactcttgtaatgctctgtatatgttttcttcgatttcattagataaatcgattaaaccttctacatttacatttaattgtatatgcattaatttactatatgctgtcaaagcatgaattaaaccttgctcaagtccaactggcttaagttgccaaatcaatgcacgcatttcattaacggcattttgactcgtttcctcaatcgtcttgaatgcttgtttagcgatggattcgtttgacatgccatacgcagcatgtgctgttagttttacagaaaataacatttgatttactgaatcatgtaaatctctagctaaacgattacgttcattaatttttgccgcttctttttcacggtctgttaaataaatacgtttgatggctgaccctaattgaaatgcgacagactctagcaactctaaatcttcatcgctatatatttcagtatttggagacgctacatttaaaatgccgaattgttcttgacccgatttaagtggtaccgttgcatgatgtgtaatattgtcattttggctaggaaatgctttagaggctaagttaatacgagaacaattgacgatattcgacgctttcattagcctacgttgattaaatgctttcacacaccaacaagacccatctttaatatagtgacagtggtctgctgtcaaagattgtggtagagccacatgtgatacaagttcatgttcacctacgctattgatgaaaaatatccagcctgtcgtgaaattactgccctcaattaaatattttaacgcaccttgggtcatgctatacatttcagtttcttcgtttaaaaattcggcaatctcttttaataaagctagtcgcgtcctttgttccatcaaatcgctccaattcatttttacgtgtattaactattatacattgagttattatatttttaaatcttagacgtaaacatgataaaatggccttgattactcaatagttatatttcggagaactgatttgtgatatgatattaaagactataggaggattttatgaaatttaaaataccagaaaactttaatgacttaagtttacgagatattttccaacaacttaaggtacctaaaaaagatttacatcatttaaatatgtctaaagatattactattaatgataaacctgcgcgattaatggataaagtgcatactggcgacgatgtatttgttccaaccatcgatgaaaaaagtaattatgttccaagttatcgttatgcacaaattaaatacgaagacgatgatatggcaatcgtaatgaaacctaaaggtgttaagactcaccctaatgatttaaaagaaagcaatactttaatgaatcatgtgatttacactattgatagtgactatgtcgaaccaattcatcgactggaccaggaaacagtaggattattaattgttgctaaaaatcctttaatgaaaaaaattcttgatcgcatgttagaagacaatgatattacgcggatatacaaagcaaatgttaaggcacttttacctttaaaaccacaaacgattgatatgccaattggtaaagataaattccattcgaataaacgacgtgtgtctcctactggacagcgtgcaattacacacattttaacttcaaaaatgataaaagaagctgtgtgccaacttgaaatcaagttggatactggacgtactcatcaaattcgtgtgcatttagctgaaattggtcaccctgttatcggtgatcctttatatggtgattcaacgttaagacaattagaacttgaaagttacaaaatagagtttgtgcatcccttgactaaggaagtcatttccgtttctttggatgactaatttgattagttttgcatgatatttaaacatgcaataccgcattgtaactaaatcaagtatcaacttaaatcggatagatggaaaattattaattttttcagatgttcggtttttttgttttttacgatgcttaggattttatattttgatattttagtaattattcattttataacatccttggataatgacttgtagtctttttcaactgcgttacgtgtatctatggacaatacatgacatcataagatttttatcacaggttgtttggccaatacatgtacaacaattcatcatataaaaaataggttctataataaaacggactccatgaaaagtttttccttttcatggctctatatcaaatcagacttataagttcaatttgacatagacaaaaaataaagcttgaacactacatctacctgtaatgcccaaactttattttatattaatatttaattaatgaggatctaccatatcttctggtttaatccatgcttcaaattgttcttctgtaacatatccagtttgaattgcagattcttttaaagttaaaccttctttatgggctttcttagcaatttgagctgctttttcataaccaatatgtggatttaatgcagtaactaacattaatgattgatttaaataattatcaatattctcttcgattggttcaatgcccactgcacaattgttattaaatgtttccataccatcagctaaaagataaattgattgtagtgtattatgcataataactggtttataaacattcaattcaaagttaccttgtgaacttgcgaagccaacaactgtatcattacccattacttggactgcaaccattgttaacatttcacattgtgtaggattaactttaccaggcataattgatgaacctggttcattttcagggatagaaatttctgccaaaccagctcgtggccctgaagccaaccatctcacatcattagcaattttcattaagtctcctgctaatgccttcaatgttccatgcaattgaacaacttcatcatgcgctgtaagtgcgtggaatttattttcagaagatacaaatggataacccgtattttctgaaatataatgtgccactttatcaccaaattcaggatgcgcattaataccagtaccaacagccgtaccaccgatggcaagatttaaaatgtgcttcttagattcagataacattgtttcacaacggtcaagcatataacgccagccactaatctcttgtcctagtttgatcggcgttgcatcttgtaaatgtgtacgaccaattttaataattgaatcaaatttatcttctttttctttcaaagtatttcttaaaagttttaatgcaggttctaattttgtttcaacctcttgatataatgcaacgtgcatagcagttgggaatgtatcattcgaactttgagatttatttacatcatcatttgggtggatactttcatcactttgatgatcttttaaatacatattagcaacataacttactacttcgttcacattcatattactttgtgtaccgcttcctgtttgccatacaactagtgggaagtgttcatctaattcacctgataaaatttgatcacatgcgtatacaatggcatctttctttgcctcgcttaattttcctaaatcaaaattagctattgctgctgcacgctttagttgtgcaaaaccataaactacttcgattggcatacgctctttaccaactgggaaattacgtttacttctttctgtttgagcaccccaatatttatctgcaggtacttctatttctccaaaagtatcatgttcaattcttactgacattcaatttctccccttatcactgtttatttaactgtagtatatcattaaataatttaattgagcaatttatgattaaaacgttttcataatttgaaataaaaatacactaatcgcacgtgttcaccctttattacagtgatacggtcatacgattagtgtgttatctatcattatttagttattattgaactaagtttaattacgatactttgttttagtagcttcaaccgtagcaatagctgtaagtatatataatacagcactaacaattgtcgtatatggatttagagcaacaagcgtacctaaaactcctgttaaactcgcataaaacccatcaagtgtataatacaatattgctgttattaataaacaacaaattacactgattacaatacctgattgattacttttaatgaatgtttgcgcattaacatcatcaattaatccttttgataaattgagttgtaattttattactttgaaaataacaggtaaatataatgccccaattgccaatggaaaagctttaattgatattaaacttataataactgttgctatcaataattgaatccagtattttcctaacataaatatataaatctcctctaatttcattcttcaatagcatatcataatcttggcatattaagaaacgcggtttaatgatttcattaaaaatattactgatagatgacttctttcaattatgtctggagtaattaattatcaattccgtttaaatggtgttttaatatttaaaattgaacttttgatatattactatgtctggtacacaaatcaatgttttatgctttacaaagttatattggcagtagttgactgcagtccacaacatagaggcttcggaatgtcagcttctatttcatgcaagttggtggagctccaacatagtggaattggattcccaatttctacagacattgcaaattggggaaacgggccacaaactcagaaactggtggaaagtcagcttaaaataacatgcaagttggcgaggccccaaaatagtgagatcggatttctaatttctacagacattgcaaattagggaaacgggccacaaactcagaagttggtggaaagtcagcttaaaataacatgcaagttggcggggccacaacatagaaaaattggatcctcaatttctacaaacaatgtaagttggggaaacagccccaacactgaaactagcagaaagtcagcttctatgaatataataaaaaagctaggtaacaaaatgctacctaacttcatattcaagataatcaatcctatttgatatatgttctatactatacattatttacatgataaataactgaatattacacaattataatactttactgactgtcttcttcagaattcttttcttgatcattttgatcagagatttgttccatttctttacctaattcttttaaatcttcaaaatccgttaccatactgttttcttcttcatgataatttaattttggatctttgtctttagacataatcaatacctcacagatttttaattaagcaaagcgtgacgtaaagtaagctttaacatcttcaggtaaacctgcagccgcttctttatcaagaataacatttaccattctatgtgcttttaaatcggctggttcgaagcttgttttaccattttcttgatataatttttcaactacatctcgtttattagcacctgtcactactaagaaaatttctcttgcttccattagtccttgacgaatactaacatttaacttaccttgctcatcgatagaaacaacttgtaatgttaatttccctttattttctttagttttaatcttatcagcgattaattcgattgcatctttttcataagcaattggataaacttgacctgctggtacacctaacgcttcgaaatatgattttttatcgtcataatctaaaatatttatttggctaaaatcaacagcatgtttttcaacatttttctttaattcatctagaactggcgcttgatctgtatctaaatgaaaacctgcaattgtagtaggattattgttaaattgctttctaataatatcagcagcatattctgctacaagttgactattgtcaaagactttaaagttcattgccatgatttctacactcctcttagtttgcattttacataaaaacggcgatattaataattattataccctaactttcaatatatcaaaccatttaactttaacatgcttatactctaaatatagcacttaagcatcatttttataatgaaaatgagtaaattttaattcaatcccggaaaatcttgttgacgtaacgcttcataaattaacaacgcagcagtatttgataaatttaatgaacgaatatgttcactcataggaattcttaacgctgtgtcttgatatttctctttcacccagtctggtaatcctgtcgtttcttttccaaaaatgaagtaaaaatctttgtcatgatttgaaaaatcaaaatcactataagtctttttaccaaattttgttaataagtaatactcgccatttgtgacttcaaaaaatgcttcaatactatcatgatacgtaatattcacaaattcccaataatctaaaccggctctttttaacattttatcatcagttctaaatccaagaggtttaattaaatgtaaatgtgtgtttgtacctgcacacgtacgtgcaatgttaccagtattagctgggatttctggttgatataaaacgatatgatttgtcatattactattctctccttgtgtctaatccttttatcatttcattctgaacttctgcatcctcttgatcataattagcattgataaaatctcttgcttcttccccaagaatttgaccaatggcccaataagcagttgctcgaatcaacggtctttcatctgttgttgcaacttttttcaattctggaattgcatccacttcattaaaatgcgccaatgctaaaatagcatttcgttgtatcggctttttaccacgccaagcacctgcaaggtgaccatatgtttgtttgaattctttattagacatacgtagtaaaggtactaatcttggctttaaaatttctggttccaaaatgatgtcatcttgttcggtattaatacctctatttttcggacaaacttgttgacacgtatcgcaaccatataatctattcccaattttataacgatattggtcaggcatatagccttttgtttgcgttaaaaaactaatgcatttctgactatttaattggccatttccaactaatgcacttgttggacaacgatcaacacaaattgtacaatcaccacagctatctaataatggatcatcaggttcaaaaggtatactgactaacatttcaccgaggtatgtccatgttcctagtttaggattgatgacaaagccattacgaccaacaaatcctaaacctgcacgttctgctactgccctatctgataatacacccgtatctaccatagatttgatttcaacatctggaactttagattcaataaatgcagctaacatgtctaatcgtttacgcataattgtatgataatcttgaccccacgatgctctagcaaataagcctctgcgatcacctctaacactcttaggtgcacctttcagtttgttaggataaccaactgcaattgctatgattgaccttgctgttggtaaggataatttaggctccgttcgtaaagcaatatcagattcttcaaatcctgaggcataaccatttgcatgatatgcttctagcttttgcttcaattcatcaaagggatcggcagtagtaaatccaatactgtcgataccaattgtatatgcatagtcaatgatatcttgctttaattgctttgtatccaatcgtatgccccccataaaataatactatgttattttaacacaaccattattcatattgaggtttcatttcacataattttaataataaaaagcttgaatatatgatataactttgtggtgcgtatcatatattcaagcttcgttaggttgttataatactcttgctaagaaattttgtgttctttcatgttgcggttgttcaaatatttcgactggtgtgcctgactctacgacaacgccatctgccataaatatgactttgtcacttacatctttggcaaatcccatttcatgtgtcacaaccaccatggtcataccttctttggctaggtctttcattacttttaatacatcaccaactacctcaggatctaatgctgaagttggttcatcgaataaaataacatctggatgcattgctaaagctcttgcaattgctaccctttgtttttgaccacctgataattgattcggatatacatctgctttttcttttaatcccactttatctaataacgacaatgcttccttatgtaattcatcgttattatctttctttaataatttaggagctaaaataatattatcgacaacttttttatgtggaaataggttgaagttttgaaataccatacccattttttgacgtagtttatctacttgtgtccctttttccgttaagtcattgccttcaaaaatcacttgacctttagtaggtacttctaataaattcatacatcttaacaatgtacttttaccactaccagatggacctattattgctactacttccccttgattgatttcaagattgatatcttttaaaacttcattatctccaaaaactttattaagattgtttattttaatcactggcattcaatctcccttcaatcatgttcataatgcgtgtaagtacaaatgttaagacaaagtataatgctgctgccactattaatggtgtgaatgggtcaaatgaaataccttgaaccacttgtgcattaaacataatttcgccaactccaattgttgacacaatagatgattctttaattaaagtgacaaattcattacctaaagctggtaaaatatttttaattgcttgtggcataattacacttttcatcgtttgtctataattcaaacctagactacgtgcggcttccatttggcctttatcaacagcatttatacctgcacgaataatttcagcaatgtaagctgaggaattaataactaatgcaattgttccacaaacaagagctgaaatgtctagtcctaatgcagcagttataccaaagaatacgataaatacttgaactaacattggtgttcctcttaatatttcgatatagatagaagcaatccatgaaataatttttattttacttaatttcattaacgcaacgaatgcacctaaaatagaacctaatgcaacaccgataagtgaaattaatattgtaatcttaattcctttcaagaaaaaactaccatacttagaaataaaaccactgtcatcattcatcgcatttgcagcattagtcatatatttatcgattaatcctttatctttaacctccttaatcgttttattaatttgtgacaataattttggtgaatcttttggcactgctatcactgtatctttttcttcttcattaaatttcacattggaaattcctaatttaggattttgttttaaatatgcttctgctacaggtttttcaactacagcaccttcaacctttccacttttcaatgctaatataacgtctggtaaacggcttaatgaagtaatagatgcattttcaatttcggtttgagcgattttttcttgttcagttcccttttgtgcccctacttttttattattaaagtctttgatatctttatattcattaactttatctttctttacaagcatgatatttttagtcatcatatatgaatctgaaaaatcaacttgcttcttacgttcaggcgttgaagtcattccggaaataataatatcaatttttccagttttaagagctcctaacaaactatcaaatgacatattgacgatttttaattttaaattattatctttcgcaatttttttagctaaatcaatatctacacctgcatactcagtcttaccattaactgtatgctcaaattccattggtgcataatctgcagaaagacccactctaagttcaccgcgttctttaatcttctcccatgtttgatcttgttcagcatgtgctgtgggattgatatacaccatagcactgctaattaacaaccctaatactaatataaacctaattaaacacttcatttatacagccctccctaattaatattcataattatacatattaatacattttgatgcaatagtgttttataaatgtatttttatcaatataaagaaaagcttctttttaaaagactgtacataaaaaatccgctattatacgtgaacaaatctcacattttaaaatcaatcaaaaaagcgctactatcaatatcttattgacagtaacgcctatatttatcatatattaaaacttattcttgtcatcaagctataaattattgttttggaacttcaaatttataaatatcattagaatatataggaatgaattttttacacaattcatgaacaataaatgccgatacaaatggtatgacaaaataaccaagtgctaataaaataatattcattgttggatcacctgacattcggttaaatgcatttattgggccaactaatcctgtatatccaaatccagcagacaatggtgttcctttaacctgaagaacgtaagcaatgattccagtaattattccatttatagtcaatggtatcgaaataattaaatttttcaagtaaactgggatcatcatttttgcagctcctatgagtaaaactgcatttacaccaatagaattgacacgcaatgagccaaataagaaagtaacacaggcagccactatacctaggtttgctgctccacttcctagtccgtttaaactaatcgcagttgcaatcgctactaacgatattggtgttaccattaataatgaaaatgccacactaataagtatagacattaacaacggatttaagtctgtaaaagaatgaattacatttccaattgcttgagtaatttttcgaatgtaaggtaatgtgattagaccgatacccccactaacgataggtactaaaactggtaatataattaattcaaaagatccaagtttgttttgtaataccatatatataagacatgcaataataacaaccaaactcgtatttataatgtcacctataccttttaacataaaactattattgctatatacaacagcacctgaaccaatcatagctgatgtacctactatagcagcacctgcaccattaaatttaaattgatgagcagctaaaaccccaataataaatgccataaatgattgaattagtatcactaactgatacgttaattctaaaatttcattaccacttttaaatatttttaatacttcacctaataaagcattcggaacaagtgcaataacaacaccagcaccaatagaatttaaaatcttactgaaaaactgtttattatcagcattatttgcgttactcataaacgacctccaatttgaacattaaactcatcatattatagaaaattaactttaacaatgattagttggctaatttaatctaaatataacaatccacaaattgaataaagcaaatttaaacaatctactcactaatcaatgtcatgttaattttaaaatactactaattacatcctgtgactaataatgtaataaattgtaaatattaaaatagccatattactattaagatagataaattgaatcgacttggtataaagcacaataaaatagcacttttacaaatatattattagaaaagttgaaacaaatatataaccccagataatataatcattatcattaatgtaataccaaaaaaagaagttaaacaggttcttcatcttttatggtgggaaggtaaaacttcctgctttttttaatacacaaaaagcgcaattgcctctataatttaaagtgaccaaacccaaactaaaggagacaagtgcgcctatgtgtaatgataccttagaattactaagaataaaagatgaaaatataaaatatataaaccaagaaattgacgtcattatcaaaggaaaaaaagcaacagtggttaatgctgtactaacgtataagccttcggcctgttattgttgtggagttaaaaatgaaggacaaattcataaacatggtaagcgtgtttctcgtattactttacttaaaactcaagggtataacacatacctcaacttagctaaacaacgttttaaatgcttagaatgcaatggcacttttactgctaaaacgtcaattgttgatgagtcgtgttttatctcaagatgtgttactcaaaaagttatagaagaagctactaaagttaaaacagagattgatactgcagaagataactgtatctctccatctactgtaagtcgtattagaactaaagcggctaattcattacgaattaaaccctttaattgtttgccagaacacatcgctatggatgaatttaaaagcgttaaaaatgtaactggatcaatgagtttcatttttatagataatgatactcatgatgttatagatattttagaaaatagaactacaagattcttgcgtgcctatttcgagcgattcgatttaaaaaatcgacaacaagttaagacggttactattgacatgtatgaaccctatgtccgattatttcgcgacctatttcctaatgcagctattatttttgacagattccatatcgttcaacatttaaatagagaacttaataagtatcgtgtacaagttatgaatgaataccgtaataaaaaaggacctgattatacaatttttaagaataactggaaagtcctattgatggatactagtaaaaccatatttagtaaatacagatggaataaatcttttaaggcttataaacgctcatctgacattgtagaattcatgctttcaaaagacgatatactacgacactcctacgaacttgtccaaggattacgaaaagacctaaggttatgtaattggcctaaatttattaatcgtttaaattcagttagtaaaaagtctgtgagtaagggtgtatggaaagcggttaaatattatagaaaacatcaaaggatgttaagaaatacaatttattacccagcatttaataatggtgctatagaaggaattaataataagataaaattaatcaagcgaatttcttttggttacagaaatttcaacaactttaaagcacgtataatgatgattttcagcttgtacaaaggagaaaaaagaagacaaccaagcccaataatggactggccgcctaataataaaaactctaaaagttgtattttaaaaatagttctttaaattatatacccaccacatttggtggagaaccaaaagaaaccttgttttacaaggtttctaatacgttatgttatgtaaataacagttaattataccggtggtcggggtcgaaccgacactccacaagtggaacgggattttgagtcccgcgcgtctgccaattccgccacaccggcttaatggtaaacaaaaaacttccctttggaagcaattatggagcggaagataggatttacacctatacctcgttccgggaaggaacgtgttctaaaagttgaactactcccgcaaatattaaattatggagcggaagataggatttacacctatacctcattccaggaaggaatgtattctaagagttgaaatactcccgcattattattaaattatggagcggaagataggatttgcacctatacctcgttccgggaaggaacgtgttctaaaagttgaactactcccgcataaacctggaggcggcaaccggatttgaaccggtgataaaggttttgcagacctctgccttaccacttggctatgccgccaataactgggctagctggattcgaaccaacgagtgacggagtcaaagtccgttgccttaccgcttggctatagcccattaataataagggcggctgaaggggatcgaaccctcgaatgtcggaaccacaatccgatgtgttaaccacttcaccacagccgccatggcaggggcagtaggaatcgaacccacaccaaaggttttggagacctctattctaccgttgaactatgcccctattaaaaataataaatggaggggggcagattcgaactgccgaacccgaaggagcggatttacagtccgccgcgtttagccacttcgctacccctccataaatggtgccggccagaggacttgaacccccaacctactgattacaagtcagttgctctaccaattgagctaggccggctaagaaatggttcaggacagagtcgaactgccgacacatggagcttcaatccattgctctaccaactgagctactgaaccataataaaaatgtaatgatggcggtctcgacgggaatcgaacccgcgatctcctgcgtgacaggcaggcgtgttaaccgctacactacgagacctataaaatattgcgggaggcggatttgaaccaccgaccttcgggttatgagcccgacgagctaccgaactgctccatcccgcgataataaaaaataatggcggaggaagagggattcgaacccccgcggcccgttaaggccctgtcggttttcaagaccgatcccttcagccggacttgggtattcctccattattataggtaaatcgctattaattataaaattaaatggcggtctcgacgggaatcgaacccgcgatctcctgcgtgacaggcaggcgtgttaaccgctacactacgagaccattagtaaaacggaggaagagggattcgaacccccgcgagccgttaagcccctgtcggttttcaagaccgatcccttcagccggacttgggtattcctccaaaattatatggaccttgcaggactcgaacctgcgaccgaacggttatgagccgttagctctaaccaactgagctaaaggtcctaaatataattttacaactaataaatagtggcggtggaggggatcgaacccccgacctcacgggtatgaaccgtacgctctagccagctgagctacaccgccttatatagtttgtaaataatatggtggagactagcgggatcgaaccgctgacctcctgcgtgcaaagcaggcgctctcccagctgagctaagcccccataataattacagtatatcgggaagacaggattcgaacctgcgaccccttggtcccaaaccaagtgctctaccaagctgagctacttcccgtataattaacgcgcccgataggagtcgaacccataacctcttgatccgtagtcaaacgctctatccaattgagctacgggcgcatatgtttttattgaaaatggtgccgaggaccggaatcgaaccggtacggtgatcactcaccgcaggattttaagtcctgtgcgtctgccagttccgccaccccggcactataaaaatggagcagaagacgggattcgaacccgcgaccccaaccttggcaaggttgtattctaccgctgaactacttctgcatatgcgggtgaagggagtcgaacccccacgccgtaaggcgctagatcctaagtctagtgcgtctgccaattccgccacacccgcaaatggtgagccatagaggattcgaacctctgaccctctgattaaaagtcagatgctctaccaactgagctaatggctcttccatggtgccggccagaggacttgaacccccaacctactgattacaagtcagttgctctaccaattgagctaggccggcaatatgtaagaataaatggtggagaatgacgggttcgaaccgccgaccctctgcttgtaaggcagatgctctcccagctgagctaattctccgatttaaaactgcctggcaacgttctactctagcggaacgtaagttcgactaccatcgacgctaaggagcttaacttctgtgttcggcatgggaacaggtgtgacctccttgctatagtcaccagacatatgaatgtaatttatacattcaaaactagatagtaagtaaaagtgattttgcttcgcaaaacatttattttgattaagtcttcgatcgattagtattcgtcagctccacatgtcaccatgcttccacctcgaacctattaacctcatcatctttgagggatcttataaccgaagttgggaaatctcatcttgaggggggcttcatgcttagatgctttcagcacttatcccgtccacacatagctacccagctatgccgttggcacgacaactggtacaccagaggtatgtccatcccggtcctctcgtactaaggacagctcctctcaaatttcctacgcccacgacggatagggaccgaactgtctcacgacgttctgaacccagctcgcgtaccgctttaatgggcgaacagcccaacccttgggaccgactacagccccaggatgcgatgagccgacatcgaggtgccaaacctccccgtcgatgtgaactcttgggggagataagcctgttatccccggggtagcttttatccgttgagcgatggcccttccatgcggaaccaccggatcactaagtccgtctttcgaccctgctcgacttgtaggtctcgcagtcaagctcccttatgcctttacactctatgaatgatttccaaccattctgagggaacctttgagcgcctccgttaccttttaggaggcgaccgccccagtcaaactgcccgcctgacactgtctcccaccacgataagtggtgcgggttagaaagccaacacagctagggtagtatcccaccagcgcctccacgtaagctagcgctcacgtttcaaaggctcctacctatcctgtacaagctgtgccgaatttcaatatcaggctacagtaaagctccacggggtctttccgtcctgtcgcgggtaacctgcatcttcacaggtactatgatttcaccgagtctctcgttgagacagtgcccaaatcgttacgcctttcgtgcgggtcggaacttacccgacaaggaatttcgctaccttaggaccgttatagttacggccgccgtttactggggcttcgattcgtagcttcgcagaagctaaccactcctcttaaccttccagcaccgggcaggcgtcagcccctatacatcaccttacggtttagcagagacctgtgtttttgataaacagtcgcttgggcctattcactgcggctcttctgggcgttaaccctaaagagcaccccttctcccgaagttacggggtcattttgccgagttccttaacgagagttcgctcgctcaccttagaattctcatcttgactacctgtgtcggtttgcggtacgggcacctattttctatctagaggcttttctcggcagtgtgaaatcaacgactcgaagactcaatgtcttctccccatcacagctcagccttaacgagtaccggatttgcctaatactcagccttactgcttagacgtgcaatccaatcgcacgcttcgcctatcctactgcgtccccccatcgattaaaacgattataggtggtacaggaatatcaacctgttatccatcgcctacgcctgtcggcctcagcttaggacccgactaacccagagcggacgagccttcctctggaaaccttagtcaatcggtggacgggattctcacccgtctttcgctactcacaccggcattctcacttctaagcgctccacatgtccttacgatcatgcttcaacgcccttagaacgctctcctaccattgtccaaaggacaatccacagcttcggtaatatgtttagccccggtacattttcggcgcagtgtcactcgactagtgagctattacgcactctttaaatgatggctgcttctaagccaacatcctagttgtctgggcaacgccacatccttttccacttaacatatattttgggaccttagctggtggtctgggctgtttccctttcgaacacggaccttatcacccatgttctgactcccaagttaaattaattggcattcggagtttgtctgaattcggtaacccgagaggggcccctcgtccaaacagtgctctacctccaataatcatcacttgaggctagccctaaagctatttcggagagaaccagctatctccaggttcgattggaatttctccgctaccctcagttcatccgctcacttttcaacgtaagtcggttcggtcctccattcagtgttacctgaacttcaacctgaccaagggtagatcacctggtttcgggtctacgaccaaatactaaacgccctattcagactcgctttcgctacggctccacatttactgcttaaccttgcatcaaatcgtaactcgccggttcattctacaaaaggcacgccatcacccattaacgggctctgactacttgtaagcacacggtttcaggttctatttcactccccttccggggtgcttttcacctttccctcacggtactggttcactatcggtcactagagagtatttagccttaggagatggtcctcccagattccgacggaatttcacgtgttccgtcgtactcaggatccactcaagagagacaacattttcgactacaggattattaccttctttgattcatctttccagatgattcgtctaatgtcgtcctttgtaactccgtatagagtgtcctacaaccccaacaagcaagcttgttggtttgggctcttcccgtttcgctcgccgctactaagggaatcgaattttctttttcttcctccgggtactaagatgtttcagttctccgggtgtgccttctgatatgctatgtattcacatatcgataacatgacataactcatgctgggtttccccattcggaaatctctggatcaaagcttacttacagctccccaaagcatatcgtcgttagtaacgtccttcatcggcttctagtgccaaggcatccaccgtgcgcccttaataacttaatctatgtttccaccatttttataagtcaaacgttaacatgaagttacgttcttttataaaaagatttaaacgcgttattaatcttgtgagtgttctttcgaacactagcgattatttcttatgaattcaagcttatttaaaactctttattcactcggttttgcttggtaaaatctatattttacttacttatctagttttcaatgtacaaataatggtggagactagcgggatcgaaccgctgacctcctgcgtgcaaagcaggcgctctcccagctgagctaagcccccaaataggtattaaattaatggtgggcctaagtggactcgaaccaccgacctcacgcttatcaggcgtgcgctctaaccagctgagctataggcccattaatttgaatgaacaaacattcaaaactgaatacaatatgtcacgttattccgcatcttctgaagaagatgttccgaatatatccttagaaaggaggtgatccagccgcaccttccgatacggctaccttgttacgacttcaccccaatcatttgtcccaccttcgacggctagctcctaaaaggttactccaccggcttcgggtgttacaaactctcgtggtgtgacgggcggtgtgtacaagacccgggaacgtattcaccgtagcatgctgatctacgattactagcgattccagcttcatgtagtcgagttgcagactacaatccgaactgagaacaactttatgggatttgcttgacctcacggtttcgctgccctttgtattgtccattgtagcacgtgtgtagcccaaatcataaggggcatgatgatttgacgtcatccccaccttcctccggtttgtcaccggcagtcaacttagagtgcccaacttaatgatggcaactaagcttaagggttgcgctcgttgcgggacttaacccaacatctcacgacacgagctgacgacaaccatgcaccacctgtcactttgtcccccgaaggggaaagctctatctctagagttgtcaaaggatgtcaagatttggtaaggttcttcgcgttgcttcgaattaaaccacatgctccaccgcttgtgcgggtccccgtcaattcctttgagtttcaaccttgcggtcgtactccccaggcggagtgcttaatgcgttagctgcagcactaaggggcggaaaccccctaacacttagcactcatcgtttacggcgtggactaccagggtatctaatcctgtttgatccccacgctttcgcacatcagcgtcagttacagaccagaaagtcgccttcgccactggtgttcctccatatctctgcgcatttcaccgctacacatggaattccactttcctcttctgcactcaagttttccagtttccaatgaccctccacggttgagccgtgggctttcacatcagacttaaaaaaccgcctacgcgcgctttacgcccaataattccggataacgcttgccacctacgtattaccgcggctgctggcacgtagttagccgtggctttctgattaggtaccgtcaagatgtgcacagttacttacacatatgttcttccctaataacagagttttacgatccgaagaccttcatcactcacgcggcgttgctccgtcaggctttcgcccattgcggaagattccctactgctgcctcccgtaggagtctggaccgtgtctcagttccagtgtggccgatcaccctctcaggtcggctatgcatcgttgccttggtaagccgttaccttaccaactagctaatgcagcgcggatccatctataagtgacagcaagaccgtctttcacttttgaaccatgcggttcaaaatattatccggtattagctccggtttcccgaagttatcccagtcttataggtaggttatccacgtgttactcacccgtccgccgctaacatcagagaagcaagcttctcgtccgttcgctcgacttgcatgtattaggcacgccgccagcgttcatcctgagccaggatcaaactctccataaaaattatgatgtttgattagctcataaatactaaataatgtttgtaacttatagttacgtttttggaattaacgttgacatattgtcattcagttttcaatgttcgtttgtcacttacaagatttaattataactcgtaagtttttgtaagtcaagaattatttttaattattttatttctaaaaaataaatttcctaactcaattaattcaacaaatattattttattatgtatttgttcgaatttcaatagtcaaatttacactttattaatattttaaatcaacaacttaaaacatttgttttttaaatattagtgccgtttgacgacttttatataatatcaagttattctagtagagtcaacataaaacaacacttatttttgtttaaaaattactgttgaagggattattttctattcgtaagtactatatgtatttaaagtgtaattccttatgctttttacttcagttttacaaacaaacttatactcactttatggatagttatttagtagaccttcgtttgaatatttttatgtttatttataaaggatactagttattagttaataccacttccgtagttagaatattcttttcttcaatttaaatatttttcagaataagcataaaaaaaagttaaacaactttcatgtcgtttaacttcttaaatattacgcttacttatatgaagtaagctaacgcttttttaatttgtcatactaccaaagttaaattatttatcttggcattctttacaaactccataaatttccattcgatgatgtgttacgtcaaagtcagtcatatgctgagctaatctttcaatttcatttaactgtggatattgaaaatcaacaatcttaccacattgttcacatataatatgataatgattatgtgtattaaagtcgaatcgacttgatgagtctccatatgttaattcttttacaattccaatatctttaaacactcttaagttattatatattgtcgcaacacttatatttggaaaatcaggtgaaagtgcttgataaatttcatcagctgttggatgagtatgtgaagaaattaaataacgtaatattgcttgtctttgaggtgtaattcttacgcctgcttgtcgcaatgatgcaattgattcttctagttcatgttcaattgattctatttcaacactcatctatatcaccatctttcttatataataattattattacttactataaatataactgtagtattgcgcgcgtgtcaatatttacatgatgatttcatttaatagccttttttagcatcaacttcattctcaattagaccattcttattgagaaaattaactagattgtttttaaaaatatctaataagtcatactttgcttcataatcattaccagttatatgcgctgttatagttacattatccaattcatataattcatgattaggtttcaaaggttcattttcaaacacatctaaatatgcatgtcgaataactttactttttaatacttctattaagagcgcttctttaactatgctacctcgtcctatatttataaaaagtgcttcatctttcattaattcaaaatgttttttctttagtaaatgaatcgtttcttgcgtttctggtaaagcatttataataatgtcagcatttggtaatgtgctttcaagtgattcgatagtatatatctcgtcaaactcatctttgttctgacctgacttgctcagaccaattaaattcatattaaaagcctttgctaacttcgcagttctagtagcaattgcacctgtacctaaaaataaaactgtttgtcctgataggcgtttaccagttattttcgaatcatatatatgttgtcgttggttatcatatgatagtttcatctttttataatcatctaaaatgaaagctaaaatgtattcagataattgtttagcttgaacaccttttccattagttaaaagtatgccgtgatctgcaatataatctaacggcaatgtatttacacccgttgcaaaccatgcaatccattttaaattcgggcaacgtcgtaaaaatgcctcattgataccgccatcataaccaactaatatatctaaatcagccaagtcgctctcaggtatttctgatgcttttttataaaatttaaaatctaaatctgaaaagcgttgttgtaattcagtttcaacttcacgcatacgatttaacccaacaactttcatatatgtcaccccaaaatgtttttaagttcttctatttgtgttttaaccttaaccttctcgataacatctaatactttaccttgttcatctattataaaagtcgttcttacaatgcccatactttctttgccaaatgatttttttaactgatatacgccagtttctttagctaatttaaaatcttcatctactaataaatcgaaattcaatccgtgtttctcaataaaattttggtgttttttctttgaatcaccgcttataccatatactgcaacatctaaatcattgaacatttctaaattgtctctaaagtcacaagcttctgtggtacaagtaggtgtattatctctaggataaaaatatataatcgcctttttaccttttaatgtatcatttgtaatgacagttccgtcttgattttctaatttaaatattggaaattgttctcctttttgcaacatataatcacctttttcttcattataataattttatgatacgatattagatgaaaatattaaattaaaagaggttgatataaatgaattttagtgaaagtgaacgtttacaacaactttcaaacgaatatattctaggcggtgtcaattccccttctcgttcttataaagctgtaggaggcggtgcacctgttgttatgaaagaaggacacggtgcatatttatatgatgtcgatggcaataaatttattgattaccttcaagcatacggtccaattattacggggcatgcacatcctcatattactaaagcaattcaagaacaagctgctaaaggtgttttatttggtacaccgactgaattagaaattgaattcagcaaaaaattacgtgatgcaattccatctcttgagaaaattcgctttgtaaattctggaacagaagcagtcatgacaacaattcgtgttgcacgtgcatatactaaaagaaataaaattataaaatttgctggatcttatcatggccattctgatttagtattggttgcagcaggtagcggcccatctcagctcggttctccagactcagctggtgttccagaaagcgtcgcacgtgaagtcattactgtacctttcaatgatattaacgcctataaagaagcaattgaattttggggtgatgaaattgccgcagtattagtagaaccaattgttggtaactttggaatggtaatgcctcaacctggatttttagaagaggttaatgaaatttcacataacaatgggaccctagtgatttatgatgaagtaattactgcattccgtttccattacggtgccgctcaagatttattaggtgttatccctgatttaactgcatttggtaaaattgttggcggtggtttaccaattggaggctatggtggacgtcaagatattatggaacaagtagcacctctaggacctgcatatcaagctggtacaatggctggtaacccgttatctatgaaagcaggtattgcattactcgaagtactagaacaagacggtgtttatgaaaaattagacagcttaggccaacaactagaagaaggtttacttaaattaatcgaaaaacataatatcacagctacaattaatcgtatttatggatctttaacattgtactttacagatgaaaaagtcacacattatgatcaagttgaacattctgacggcgaagcgttcggtaaatttttcaaattaatgttaaatcaaggtatcaatttagcaccttctaagtttgaagcttggttcttaacaactgaacatacagaagaagatattaaacaaactttaaaagctgcagactatgcttttagtcaaatgaaataacttttaaggaagtatatttttaattgaattaaaataaagcaaatgctcacatagtagattcattttatatcgttaactattaacgtttaacttgatatgtcactatgtgagtttttattttacaaatttatactattttaatctctaactaaagttttacatcgctatcagtattatgtatgatttattttaacaactataaataagcttgaattttgtaactagtaagtgtataacagtaatgaatacgaatattagatattcaataaacttaaaaggggcgtcattatttttgagactaggagctcggatttttaaaactggtatagccattattttagctatgtctatcgcttctttactaccggatgatgttggtctgaaagccttagctggtgtcagtgctgttgttgcaatgcaacctagtatttatcgttcatttaaaacagtttctgatcaagcattgggtaacattataggtgccatactatctgttacaatggtaacaatttttagtgataattttatcattatgggtgttaccgtcatagtacttattgctattttatttaaatttaatttagcacatgttgctactttggcgagtgtaacagcattaatcattatgggacaacataccggttctttctatattaccgccttttacaggtttgtacttgtaatgattggtgtcataagttcatctctagttaactttgtgtttctaccacctaaatttgaaacaaaaatttactataattcattaaatatatcctcagatatttttatgtggtttaaattagtattaaatgatacgacggagtttaataatattaaacaagatagtcataatttaaaacaacgtgtcgaaaagttagagaaaatttatgattactatagcgaagaacgtcctattacaaaaaaacatattcaccaacagaatagaaagaaaatacttttcagagaagtagttcagacgactagacaagcttatgaagtattaaacaaattgtcgcgttatcaaaacgacttatatttacttaataacaatttcctattacaaatcaaattagatttagattcattaactgcttttcacgagcaaattttagctagcctttctaaaaaagcacgttataatgtgacacatgttgattatgagttagataatccgcagaaaaaagatttattgtccacatttcagcatgagttaataaatcatccttatcaaacggaatattcgtttgccaatgttatgcaaattgttgcagccatcgaagagtatcgacaccatttagagcatttagaccgcataagaattagctttttcacatatcatagatctgatgcagacattgaaattgttgaagaagactttgatttataacattaaaacaattttatcaattaatgccacaatgagataaactaatattgaatctcgaaattaaatttaaaaaagcagtaagattattttcaattaagaaaatctcttactgctttttctatgttatgaccccaccatcctgttacaaattttctcttcaagattgtactgaagtcaaacaactaatactttataagttttgaatgctatataaatgctcgtaagcaccttgttttgcaatcaattcacgatgcgtacctgtttcaacaatatgtccattttcaattacgacaattttgtcagcatgtgtaatagtggacaagcgatgcgctacgataagtgtcgttcgatctttactcaacacatctaatgcttcttgaataatggattcactttctaaatcaagtgcacttgttgcttcatccaagataagaattggcggattatttaaaaatattctagcaatcgataatctttgtttttgaccacctgataatttaacacctcgttcacctacttcagtgtcatatccctgtggcaagttcataataaagtcatgtgcattagccattttcgccgcttcaactacttcttcatctgttgctgttggacgaccaagtaaaatattttccttaactgtatcagagaataaaatattatcctgttgcaccaatcctatttgatttcttaaacttcccgttaaaaaatctttaatgttgtgaccatctattaaaatttgcccagaagttacatcgtaaaatctcggtattaagttaattaatgttgatttaccaccaccactcatacctacgaaagcaactgtttctcctttttcaatactcaaattaatatcttttaaaattggagcttcgttatcgttatattgaaaactaacatgatcaatatcaatacgaccttgtttaatttcaataggttgagcaccaacaccatttttgatgtcataatcttcatcaattaattggaatacacggtccattgaagcaaaactttgcgttaaagttgtaaatgatgcgactaaacgacgtaaaggcccgaacaataactctaagtatccaacaaatgctgcaagtgtacctactgtgattgatccagaaatagcaagatatgcaccaacaccgatgacaataattggtccaatatctgtaactgtattaattgcggcaaaggaataggcattccatcttgtatgtttcaacgcacgtgttaggaaattagtattctttttatcaaagtttttcgcttcattgtcttcaatcgcaaaacttttaacgactgaaataccttgaacacgttcatgcaagaatccttgaacctcagctaatgcttgagatctttcacgtgtcaattttcttaatcttccaaagaaaacgtacaccgttaaaatgtaaaatgggaagataaacagtgctgctaaagtcaatttcacatctaaaaagaacattatggatagtgcaataataattgttatacaatctaaccaaatattcattaacccggttaaaatgaaatcttttgtttgttcaacatcattaatcactctagatattacttgacctacttgattattagcataaaatctcgcacttaaagcttgtaaatggttgtataactttttacgtatatcatacaatattttattacttgtccattgcgccaaatattgacgtataaattcaattggtggtctcactattacaaaaataaataatgcgataccaatggcaatagttaaatgatgaactttttcatcagtcgttagtgcgtggttattaatcacgccatctattgcatatttaattaatagtggtataagcattggtataccaaacttaattatcccaacaataatcgttgcaaaaatacgatatttgtatggcttaacaaattgcaaatatcgtttaatcatacaatcccccctaatctattgccctatcctattcataagcataaaaatgaatagaggttggatacataatttgtagatgtaaattcttcttacaatttacatttttaaaattaagatatctcaacctctgtcatattcatgtgattaaatacgttgtcttattcgtatgttatattctattcaatttaatctatggatactgtgtccccacacgacagcaaaagttatcatacttctttacatcactaagtcaatataaatgatttaatcagtatttacactttatttgcttaatactgtctaatttttttgtaacgttctttccaaactttgataaaatctggcgcgaatgggcccttcttctgttctatccattgttgaagaatgtccacgttgcgtcttaaaataatatcaatatcatgcggataattcatttgattcatatgttgctcatattcatcttcatctaataaatgatactttccgtttggatatactttaatatctaaatcatagtctatatattttaatgcctcttcatcacaaacaaatggtgatgacaaattgcaatagtaataaattccatcttctctaaacatgcagataacattaaaccaatattctgagtgaaagtaaacaattgccggttcacgtgttatccaagttcttccgtcactttcagtcactaacgtatgatcatttccaccaatgacaacatgatcagtaccctttaatattgttgtttcagaccaaacgcgatgaatcttaccatcatgtttataactctgaattttaatgttttccccttctttaggtatggattctctgaccatactccacaccaccttctgttaatttaaccattataaattatagcatatttcagaaatagtattatataaatacatatttttacgaaataagattttactacttaataattaaactcggtaatattgctaagtactacaacagagatttacatgtcccatttaaagtatataaaatcatcacttttatatatcaacactttaactttttgacattgttattctatgagatttaaagatatcatttatactttttaaaattaatgtcactatgttttccgataatattaccaatcatcgaatgttacccatttataaattgataaatctttgacataggtacagggaatgtatattgatctcgatcacttaaatcaaaccaaatcatgtcatctggtaatgtttcaatgttaattgctcctgaaacggcgtatactttaatcttccatgttaaatgagtaaattgatgcttcaactcaaaaataggtgtttctactggttgaatgtcatgaccgattttttcagtcattttacgtctagcatgctcactttcaaacataggaaattgccacataccatgcaataatttttcgctacgcttttgcaacagatattgaccttgattatttctaattaaaaagacggattgctcaattacttttttacttacatttttagatttaacaggtaacttttcaaatgtacctttatcaaatgcctcacagttttcttgaactggacaaaataagcataatggattttttggtgtacaaattaacgcccctaattccatcatagcttgattaaacgttccagcttctgtagtaacatacggtaataattcttgttcgtacgatttcctcgtcgattgtaatttaatatctcgatagtcatcattcaatctagaccatactcgaaaaacatttccgtctacagttgctagtggtacattatatgcaatgctcattactgcagcttgtgtgtatgggccaacaccttttaacgctttaaattgatcaggatctttgggaactaagccttcatatttatcatgaacttctttaatcgccgtatgaaaatttcgagctctactataatatcctaagccttcccaatactttaacacttcatcttccgaagcttgactcaaaacttccacagttggaaatcgttcaacaaaacgatgataatagtcaataactgttttaacttgtgtctgttgtaacatgacctcacttaaccaaatatagtacggattggtcgtttgtcgccatggcatttctctttgattttcatcaaaccagtgtatcaaattttctttaaaactagactgctgatacatttataaaaccctttcctcaccaaaattaattgtctttactcataatgtttttattgtacattaaaatcatggttagtatgtaagttaatttagttatttgcgaaattggattataatagtatatataatattatgaaatgagtgaactgatatggacactgcaacacatatcgcaattggggtgggccttacagcacttgcaactcaagatccagcaatggcttctacgtttggtgcaacagctacaacccttatcgttggttcattaattcctgatggggatactgttcttaaattaaaggacaatgcaacatatatttcgcatcatagaggtatcacgcattccatccctttcacaatactatggccaattttaattacatttttaatattcacgttctttagtggaaccaacccatttcatgtatggatgtgggctcagctcgcagtatttttacatgtctttgtagatatattcaattcttatggtacacaagcgcttagacctatcacaaacaaatggattcaattaagtgtgattaacacatttgaccctattattttcacagttctttgtattggtattgtattatgggttataggcttgcatccatttgcagtcttctttcctataatcgctttactaatcatttattacatgattcgttttaaaatgagagccgtaattaagcaacaagctttaaaagcaattcaacaagagcatcaccctgttaaagtatttgttgcgccaacaataaaatttatggaatggcgtgtcgcgatacaaactgatgcacatgactatgttggaaaagcatatggtaggaatgtggtgtttagtgataaagtggaacgtcaaacattatcaacagactccattttatggaaagtcaaaggtaataaagatatacgtacttttttaaacttttcatcaatctatcgttggcaaacaacaacgttagcagatggttctactgaaattcgtttgattgatttgcgttatttaaaaaatgatcattattcatttgtggcaattgcacatgtaacaaacgataatgtcatagaccactcttatattggctgggtatttacagaagataagttacaacgtaaactgtatgctaaataatttcaagttattattcactaaagttaatctataaaaaatgaacaaccgggcagaatgaaaatcaaaacgatttttactctgtccggttttttaatgtaaaactatgaatgcttttacaaaatctaaaatttatattgttgctaacaaactacctttaatgactcgaaatatcaaaatcagtataggaaaacaatatctagatgatattctaattgtttctgattctcacagattaatttacacaacaggtcagctaaacatcatgaagaagtatccgcctcgtctgtactatcatttgaaacatcctgttgattatcagtttgtgtcactttagatgttttattataaattgcgtgtgtcgtataccttgctaatacgaaatttactgcagctattaaacataagaataaaataaagtaaaaatgatatggaatgttttccatacttgatataccaaatatgatagattgtgctataccattaacaatgtaatacattggatttagcattaggatgtgattgataaatacatgatttggatttggtatgaaaataattggtaacaataagaaacacaatacacaaaccccataaaatatgatatttattttttcagttaacagtcgaataagaccaaaagtaacggatattaatcctacaaaaatagttgccatcacaataaaatagaatagcgctatatatgatgtttcgaagtttactggtttaaccaatgcactaatcatcgtcaaaatgactagcataataaaacttaaaatagacataataactactggcgtcgctgcggaaatattaaataacttagtaactaaaaagtcattcatataatgatgataagagatataaattgtgaacatcactaccgcaaaaacaatcaatacaatgattctaaataaccatctcacctctttaacatcggtcaaatgactaaaggaaaatagcgtttcacttgcaataataagtattaaacatgcagctaatacgattagaaaacttttccaactttgttttaaacgttctgttacataccttttagtatgcggtaagtttttaaaatataaaataatattatctagcatctttacacctacaattcaatataaatccatttgtcttctttcaaattggcaatacaatatccattcccaactttagtaatccaaatgttattgttaatattaaacttatcttttaattcttttttatctacaattggataaacaaaaccgtataactgattattatcattgaaaagtaattgtatcggttgttgtgtaacggatgcaacgaaacggttatcatcatcaggaactaaagtttttataactgaactatgctttttatgtaattgactattaaagtatgcatagtaattactataatttgatttcatatatggtgctaattttttaaaactatgcgtttgatataaacctgccgggttaaaatattctaatttatctttactaacatagtaagtcttattatcggcggtaacacgataatttttactattttcgccagtaattgtaactacactatattttggaattgtgacttgtttatccccttgcatatccacactgccattaaaagcaattccataagctaacttttcgccatatggatctttattttcattttgcatcgtagcacgattcgtaaaatctgttatcgaaataattcctatattattgaaaatgagcaacatcatcaatgctaagcctaaaatagtacctgaggccaaagtccaaaaacgcactaaaaacttaggcggttttgcatgattatagcgctcaacacgtttgaaattataggtcatctctggtattcttgtacgattctttttccaatctaaatcaaagttttcaatttcttcttttgagtttagacttaatcgatcacgttcatgttctttaaaagatggaataacttgtttaagtgacccttccattcttaattgaccatgtgaaaaccaagctatgtagttactcacttgtgaaattttatcaatatcatcaccaattgacacaatcgttaaattattttcaatataatcatttgttaattcaatcgcacgttccataaattgtggtgttaaatagtcaataacatgatttaaaataataatatttgattttgatgagcgtgcaatacttaatagtaattgagcgtatgccgctttcgaaatatggttaaccggcttcgttttataatcacctaaatgtgcatattgaataatctgttcagctttatgatcattaatttcatatggaaatagttgaactaactgcgctgtataagcttcaacagtttgatgaattaacgattgatcttcaatatatccgtagaacaaatcttcagtacaaactactttacctttatcaggtttaattgcacctgccaacaattgacctaccaacgctttggaagattcaggttcaccaattatacctaatgcttctccttgataaatatgtaaactaatattgtttaaatcgatatcttcagcatcatatccaaaaggtaaataccatttcttattctgtttattcctatagtagtgtgttacttttagtaactttaaaacaattgaacttcccatctattttcatccttctataattgtaataacgctataggtaatccttcttcgggttcatcgctattaaatctaaacccccacgcaaaaataccttttaatctttctactttaaaatattgattactgccatcagtcagtttataaattttaccaatttctatcttttttctgtctactaagtaactttcggcaacaattactttactttgataaacgtcatattcatttaaaataccattcatctcagcttttctcattttctctttataaagttgtatttcgtgtcttaattctggctcagacatctcactcaatttcttctgttccatcggcaataccactttcttctaatttagctttaattttatcatatttatatccttttctcataaggccttcgatagtttttgaaattaatttctgttgcgtgtacttctttcgatttttattataaattttttctaaatctcgttgtaataaatcgtctaaaaccgcttcatcttgtgtaaaatccatttcattcaatacagcatgaatggtttccatttcaaaccctttttgaattaaagattgcattactttttctttaactttattttgtggccctttttttgttttagatattttttcagcaatttggataatatcatcaagttcctgttgttctctataaagttctgtaaatatttcaatgatatttggttctataccaagttgatatagtttttgttgataaattttaggtcctttatctgtcgtgcgaatcattgtattttttaaactttccgcataatcttgatggtcgattaacttttcgcgataacaatattcaatcacttcagaaatcgcttgctctgatatctcttctttttgtaaatattgtataacttctttttcagttctctttttatatgataaatattggattgctttatttaaacctatgcgataatgatcatacttttgaatctctgccatgtcagcagcttcaagttgttgccctttttttaaattaaatttgactaatgtatcaatatctatacccatttcaaattgttcgtctaaaaaaagattaaaccgttctttgtttttcttttgaacttctattttagtaatcttcggcactggatcaccccgttactttcttaagttttaatacaatactcttttattattcaataagccacttcctatagcaaatgtttaactttaaatatttttcgatgctaacaaaaaatcacactatcatcttttaaaatgaaagtgtgattacaagcaaatctgtaaaatttataaagcagaaacaattcaactttatcattatgacatttcaattaaaccttctacattatagttccaagcatcttacacatgaatgcaagtatttaacgatttaattgtgacatagcctgttgatattgtgtttcattgatataattttgttgcttcattttttctaagttcgtgcttacacgttgcgtaaaattctctgacatattattgatattatatacgctaggtgcattgactttactagctaaaatagcgctttgtaaaactgttatgtgagacattgttgtactatttttattcacggttgttccaaagtaatggtttgctgcgccctcaagcgtatattgattatccccaaagtaaatattatttaaataaaagcttaaaatttcgttcttattatattgtttttcaactcgatgagctacaaataattcttttacttttctagtaaatgaacgatcattatcataaaaataatttttgacaacttgttgtgtaatggtactaccaccttgcacatctctgtcgctaatcgttgaaaataaagctctagttgtacctttcaaatcgaatccatgatgattgtagaatcgttcatcttccattgaaataaaggcacctttaacatactctggcatgttatcagctgacacaaaactacttttattttcaatttttcttagttcatccacattatcgcgtgtagataaaaaatacatgataccaataaacaatgcgataatgattagaatggttaataatatttttaatagtattcgtttactttttttctttttcggcggtttgccaactggttgataatacgtattatagtgaggttcgtgtttcatatgctcaaaatgttcatttgagtttgagtacctatcgcttcttttcatgcgtttgctccttcttttaaaactcacttagtatataccttgagtttaccagtactatcacaaataggctacactttttgggaaaatcagtccaagggcttacaatcgtatacgccatcatacttacttttttgttttttgaaaaaattatagataaatcattgcaattttaaatattaatcatgtcaaatattgttatattttataaaaataaaagaccatccctattaaatgccaatagagacgaccttttatttgttattcatttattaaaactaaaatccatatttcatttcaaacgaaaatatataaattttaacaatcgataaccacaatacttctattgtaattgtttaacgatttctcgattaaaatcatctaaatcgtctggtactcgacttgttacaatattgttgtctacaactactgactcatcaactacatgtgcgcctgcatttgataaatctttgcgtacatttaatactgctgttaacgtacgaccttttaaatcgtctgtatctattagtatttgtggcccatgacaaatggcaaatgttggtacatcatttttagtaaagtatttagcaaatgtgccatatcgaccttctgtatctccacgtaaatgatctggtgaaaatcctccaggaattaataatgcatcataatcttctggtttagcttctgcaatgcctacatcgacagtaactttttcaccgtgtttaccaacaacttcactatttgcagtatctccaatcactacagtattaaagcctgcattctctaatgcctctttagggcttgaatattctatatcttcaaattcgtttgctagaataattgctacttttttagtcattgcaaatcacctttctatatatcattgatataattactatagacaagtaaatcagtgattaaacatacaagatataaaaaatattaagcgactgtcgcgatatctaaccctaacacatcttatgtggcatttacttagatactaatttaaccttttcttcaagctgatctaacaatccaatccattcatctatatcttcaacacgtacttcatcaggatttacatgatcgatatcctcaataaacttatttaaacgcgcttttatctgttcgattgtttgttgttcattcataaaaagttaactccttttattttgttttctttttcattattatcctaacagaaattgcgttaaagcgatataatcttagctatatttatgacattcaaattattttgacttttaaaaatccccttttcaattaactaaaattaagagataatttgttacgagtgataatacgaagtggtatcataccgatatgaaccaaatagaaagaaggaagtttaagacgatgaatagcgtcaaattgaagcaacctgttagcatttacaatgatccatgggaagcatataacgatgttaaagaacatggccaattaactttaagtaacatcgaatttacaactacaaatctttgtaatatgcgttgtagccactgtgcagttggttatactttacaaactgtcgaccccgagcctttagatatggacttaatttatcgtagacttgatgaaattccaaatctgcgaacgatgtctattacaggtggcgaaccaatgttttctaaaaagtctattagaaatgttgttaaacctctattaaagtatgcacatcatcgaggtatatatacacaaatgaattcaaacctaacattgcctcaagatcgttatttagatattgctgaatatatcgatgttatgcatatctcacacaactggggaacaactgatgaattcgcaaatgttggctttggcgcaatgaagaagcaaccaccgttaaaagctaagttaaaattatatgaacaaatgatttcgaatgcacgtacattatcagaacaaggaatgtttgtatctgcggaaacaatgctcaatcaaagtacgctaccacatttacgaaaaatacatcaagaagtcgttcatgatatgaaatgtagcagacacgagattcaccctatgtatccagctgactttgcaagtcaattaaatgtgttaactctagcggaaatgaaaaagacaattcatgatatattggatttcagagatgaagatatttggatgttatttggtactttgcctgtgtttccatgcttaaaggatgatgaagatcaaaagttactatcacgtttaagaaatgctaaaaatgtaacgactagaaatgacccggatggccgtagtcgtttaaatgtcaatgtatttacaggtaatgtaatcgtaactgatttcggagatgaaacaggtacaatttcgaatatacaaaaagataaattaacagatgtatttgataaatggttatcctctgatcttgctaaatcattaaattgtcattgttccgagtttagttgtttaggaccaaatgttcttgttaaaaatatgtactatccgaatatggattttaaagataatgagcgtcatatgcacaaacaaccacaaattatacaattttaaaaactcttaattatgcggagaagcactttatcgataagtagtctccgcatattttaatgctattataaaataaaaaacaattaattgctggcagtactctacttaaataataaagggcatttaataggactaatagtctataataaaaggggtaaattttaactaaaagcataaacgtgcataatcaaaaagacagattgtaggtggaatattcgaacataacagttcaattcatccttaacaatctgtctttatatttttagtctctaatatgttgcacttgagctaaatattcaattgtttgtttactttcaatgcgacgtgcttttcttcgttcaacacgttgtggtgctgtatcataaaaccatttttcaacatcatcttctggatatacaccaggtacatgtttaggtttgccttcatcatctaacgcaacaaatgttaagtaacttaatgcagctaaatcatgcttgttattaaatacatcgtcaattctaatttgaacgaccacttccattgaactagtcccagcgtatgaaaccatcgctacgtattgtaatatgtcccctgttttaatcggctttaagaaatctactgagtctgtagatgcggtaactacttgcgcaccagcatgtttcatagctgtgattgctgcaatttcatcaatattagccatcaatgtaccaccaaacattgtatgatggtgattcgtatcttgagggaaaacttgtctatttttataacattttgattctgacatagatttcattggtctgtcctgatttgtcattattttatctcccaatctatactttaatcacgtatttgacctttaaatacatgtttcatttcctactcagcacctcaaaataacatttattaaaatgttgatgcccaatttccattttcaaatactagttcttttgaaccatcttcgaatatgccataaatagtcaaatcactactaccaatcatgaaatcgacatgtacatttgaatcatttaatccgcttgcaatcttttcctcaacagtcatttccgttccaccttgaatattaaaggcgtaagcagatccaatcgctaaatgacatgctgcattttcatcaaataaagtattgtaaaaaatggtattacgatttgatatcggtgaatcatcaggtactaatgctacttcacctaatcttcttgaaccttcatcagtattgattaaatctttcaataccgcttcaccttttccagctgaaaaatcaataatctctccatctttaaacatcaatttaaattgatcgataattgtgccattataacttaaaggcaatttattagtaacatatccatctactctatttcgatctggtgctgtaaatacttcttcagttggtatattagcaataaaagcttgttccttgccgttaacataacttgtagcatcttcccagatatgatttttcgctaaacctactgttaaatcagtaccttcagatacataatgcaacgcatggtaatttttttgttgtaacttttgagcgtaaacacttaaattagcgatgtgttgacgccaattttcaactggatcgttaccatcaattcgcacaatatcgaatacctcgtcaataaacttaatatatgcttcttctacagatagttcaggatacactctcttcgcccaagctttagatggaaaagcagctacgacccatggaaattgatttttttgtacactttccatatatcctttaaatgcgcgtgcgttttgttgttgaaatgcttgtaatttttggctatcgataccatccattaaatcaggatcttcactaataagtgctaaattagcagcgccacgtttaacgtaatccattctcgcttcaacatcatatgattttatctcatgattagcaaaatgttccacagattcattttcaaattttaagcgttttaaggttggatcgctatatacaacacgtacatctgaagcgccacaatgatatgcttcttctacaattaaatgcgttaattctaatgtttctactgatgatctaataaatactggctgttttggttgaacattcataccaaccttaactaatagttcagcgtattgttgtaacttttctttgtaattagtcaaaattcccactcctattcgtgtcgcaattgtcctaaagcgtcagcaatagctgtcacttcacttggcgacaatctttctcttgattgaacaaaatcatatatatctgttaattcttcttcatttgcatttttatatttttcaggatctaataatccttgattaacaatatttaacttctctctaatagctaatactttctcttcatttgtcatagccacaatgttcacctctaataatagttatgttatcaaagtatcacaatttaataaactttaatagaattttatataatctgctttcttattgtttaaagtcgctataaaatggggatataactacatagtttggaggaatcaaaatggtagatgtagcatttgtctgtcttggcaatatatgtcgttctccaatggcagaagcaatcatgcgacaaagacttaaagacagaaatattcatgatattaaagtacattcaagaggtactggtagctggaatttaggagagccacctcatgaaggtacacaaaaaattctcaacaaacacaatattccatttgatggcatgattagtgaattattcgaagcgacagatgattttgattacattgtggctatggatcaaagtaacgttgataatattaaatctatcaatcctaatcttaagggacaattgttcaaactgttagaatttagtaatatggaagagagtgatgtaccagatccatactacacgaataattttgaaggtgtatacgacatggtattatcatcttgtgataatttaatagactacatcgtaaaagatgcaaatttgaaagaggggtagttttttatggaaaataaatttgttcctggtattttaattggtgccgtaattggtggtgcaattagtttagctgataaatctacacgtcaagctttagttcaatcagttaaagatgcaaaaaatggtaaccgcactcgtaagccttctaaagtcagcaagattaaagacgaagttttatactggaaagatgttgttgaagaaattcgtcgtaataatcctgaattagaacgttcattaaaggatgcgaaagaaacatttgttaatagaaaaaatcaacgctaagatgattttgtttttataaggcaatacttaacaatttggtgtacgcctttcatagttatcattattaaatgataatacaatgattggccaaactgcattgtttcagtattgcctttgttttaattttaaatcaaaatagcctatgaaagatttaaatcaattaatttctataatattatcatttttaaagcatatcattgtttagtttttttataattggataaatactaatagttactttataaaacattacatagagaaaggttaaggagtgcacatgtcgaaaaaggatcactcttcttcaaaataccttaattctgttaaggaagcgcaagaggagtcaaaaaagaaaaataaaagtaatcccaaaattgatgttgatcgtacatatattgaacctcaacaattccaatctaagaaacctaaaaaagatgatcaggttttcttcttatcaagattaaataaacctgcaaaatataagaaagactctaatttcttatcatatctcatctatcgcataggaaaagatgatgcctcaggactagcagcacaaatgacttaccatttcgtacttgctatgttccctatgttgcttttcctattaacattattaccatttttcaatattaagcagagtcaaattactaatatgttaagcaatgcacccgctgaaacatctactctaattaagagtgtaattggtgatataactcaaaactccagtggtggcttattatctatcggtttgattttagcaatttggtcagcttcaaatggaatgactgcaattatgaattctttcaatgttgcttacgatgtagaagatagccgtaatggaatcgtattaaaactactaagtgttgtcttcactgtagttatgggcgttgtgtttgtagttgctctagcattaccaacgcttggttctgtaattagtcatttcctattcggtccacttggatttgacgaacaagtgaaatggatttttaaccttattagaattgtgttaccaatcattattatatttatcatatttatcgtgttatattcggttgcacctaacgttaaaacgaagcttaagtcagtattaccaggtgcagtatttacttcaattatttggttagctggttcatttggttttggttggtatatttcaaattttggtaactattctaaaacatatggcagtatcgcgggtatcatcattttgttactatggttatatatcacaagttttattataattgtcggtgctgaaatcaatgcaatcattcatcagcgtagtgtaattaaaggtaaaacacctgaagaagcagcattagaacatgatgacaataataaaaatcattataatgagaacactagatacgaatatgatgaagatagtaatgcaacacatcaacgtacgtatcatgttgatgaacatcctagtgatacctatccagaagatgataaaaatataaaagacaaaatcgttgataagcttaaaaaagactaaacaccaacaaaacagaggttttcgctaatgattattgcgaaaacctctgttttttggtgtctatttgatgttatattgtgattggcgtaagtaacttttcttaattcgatatgaactattgaattaaattatgttggaatgcatagataacagcttgtgttctatcttgcacttctaacttacttaaaatgttactcacatgtgtcttaaccgttttaatagtaatatgcgatgcactagcaatttcttgatttgagtaacctttcgcaatcaataataatatttccatttctcgttctgtaagcatttcatataactctgcgcgctttttcatacggttacgcattttcactaaaacttccggttcaaaaacagattctcctctagaagttttacgaactgcatcggcgatatcttttgcacttgttgtttttaaaatgtaactatcgacacctgcatctaatgcacgatatacctctttatcttcaataaaactagttaacattaatactttaatttgcggtaaatcttttttaatctgagtcgtcgcttctacaccatccatgtcatccataagtaaatccattaaaattaaatctggcttcaactcatgggctttggcaattgcttctttaccagaagcgccttcaccaactacttcaatatcactttgcgttgatagataacttgaaattcctatacgtaccatttcatgatcatccacaaacaatactttaatcgtcatacgaatcctccttatttaaaggtgctttcacctcgatacgtgtacctgaatctggcaatgatacaatatggaacgttgcaccaatttccaaagctctttcacgcatatttttaagtccataactttgttctaatttttcatcaacattaaaacctttaccattatcttgaattctcaacaataaataatcgtctttattaaacaattctactgtcacttttgtaccgtttgaatgacgcaatgtattcgaaattgcttcctgtgtaattctgaacaaatgatcttcaatacctttaggcactttaaaatcttgtatttcatgcacaactttcattggcacttttttttgtaaatcaataactaaatctttaataccctcacctaaagatttgtcttttaaaccaagcggtcttaaatgtaacagcaaagcacgcatttctaactgcgaatcttgaaccattttctctaaaataggaatttgttggtctaatggtggttctaacttcgtttctttgatagcagatagcatcatacttgccgcaaaaagttgctgactaacagaatcgtgaagttctcgtgctagtctttgacgttcatcttcaataatctttttaactttcacatcattaatattataattttcattggttaagttttgagttttaagtcgcaacttatgcaattcttgatttaaaggtacaagtgtatggtataaatctaacgtttcactatatatttctatattttgatcattaatgccaactgtttcgccttccattgaacgctcaatttgcgtcttaatccaatcattttgctgattgattttgtaagcgagtaccgaaccaacaataatacacaataatatgatgatgagatttaaaaataaaaaaactggtattccgaatatttgtgtataaaacataccttgaaaatagatgatatttacaaaaactttatcgatgaacagaaatgcagctagcatgctatatactaagatgagcattgaaccaattgttctaatgtagtggttcatcgataaatcacctctacgtctccgataaacgttgatacgtagatattaactgtatagttatccggtttcatcatttcttcaatatgaatattgttattttcaactttatatgatttttcattcacgtaagtacttccataaaaagcagctacatgtaaattaatattgtaattaaccggcaatataacctgcactttacctaaaatgtgtctaacaacaatggtattattttccttaatatttgcagcttttgttaagtcaatatgtaggtcgccaattccatgttgaatttgtacatcttcccacttatatacataaactggtgtacgttgctcaccaaaccacttttgtttaataaaagatggtgaagtcataacctcatccgtcgcaactactttttttggtttaaacttgtgtattaaataacgcacaataagtaataataaaaagacgaacaagatgatgattgtatacttattagacaataatgtgaatgcaattaatagcgcgcctatccaaaacgccaaaaggccacgtattttatgaaaataaagatatcctacataaactaatacacatcccaataatagaacgagtaaaaagccaattttttcaaaaaatatgtagtaaaaattggcaataatcattaatgcagtaaaaatgatcaacatttgcgttgatatatatttgtgtgtcatgtttcgccgcctttctatgccacagcgttcatataatttattagatacgatgttttttctgttgctattttttcagttgaagtttgttgaatttgagtttcaatttgtgcataatatgcttcaactttattcaactctgatttaatattttcaatttcttgattattgatttctcttgcacattgaatttgaaatgcttcagcaatatcaatatatttattttctaatgttagcattagactgtcaattaacttgctaagttgttcttttttagtaattaaataacgcatataatcatctaaatttttcattttttcatctagcattaaaaggtagtgcttgatattatttcttactgttgctctcaaaaactgttcaatataacgttcaacatagttcataactatcaccttttataataagttttaaaataccaaatgcgctatgtatcttcgttgatgtcgatgatatgtttgcttaaaaactactttgttacaacatatttttgaaatgacgcattgattgtgttcttaattattataaaacagttccgaaaccaatatgaataggctccggaactaaatgatgttcatactttagtcttagtatatgttgaactattcttcttcaatctttgtcgttaaaatcggaccatccttagtcacgataaccgtatgctcaatttgagcaacaaaacttttatcgctcgtttcaaaagcccattcatttttaccttctgtaacaaatgatgcatttgatgagataaacggttcaatagctaataccataccttcagttaataatgttttgtcttttggatcaaagtaattaagtacatgtgctggtgcttcatgtaatgataaaccaacaccatgacctgttaagtttttaatgactttcaaatcattttgtctagctgtattatgcaccgctttaccaatgttacttaacttagtacccggttttacttttgcaattgcattctcaaatgccatcgttgctacgtcacatactttttgtttcattggatcatctgattctccaacgacaaatgaaatgcctgtatctgcataatagccattcttcaaagccgatacatcaatatttactaaatctccttcacgaatgacacgcttacttggaatcccatgtgccacctcttcattgacactaatacacgtttgaccaggaaaattttcatcatgaattggcgcagaaatagcaccgtattcttcaaataactctttcgcaatattatcaagctctttcgtagtgatacctggtttggttgcagcttgcattgtattgcgcactttagcgcatatgtatccaatttcttttaacgcttgtaattcttcttctgtttttacaatcattttatcccgttccttttttatataattataacttattatagcaaaaattctttgatatactaaagatgttactttagtattttggaaagtgagtgagacatagtgtgataaagaaaaaatatttctttatcgttgtaccccaacttgcattgcctgtagaaattgtagatccaatttctctatgttggggccccgccaacctgcacattatcgtaagctgacttttcgtcagcttctgtgttggggccccgccaacctgcattgcctgtagaatttcttttttgaaattctctatgttggggccccggactataattgaaaaatgcttgttacaagtgcattttatttcagtcaactactaacaatataacattgtggagcccagaactttgattaatgtatatgaaaatcaaagtaatgcttatgtatgattatttcaaatattttacatacatgaacttttccaatgtacgatactattattataaagcgctcgctaagattttacgatgattagaggttaaaaaatgaacgatcaatggtataaacatttaattggtgccagaacaattaaaactggtattgccatttttttaacagctgtcttttgtatggcactagatttaacacccatctatgccattttaacagctgtagtcacaattgaaccaactgccaaggcatcacttattaaaggttatcgtagattacctgctacggtaattggtgcaggctttgcagtattatttacatatttattcggcgatcaatcaccttttacatatgcattgagtgcaacgttcacgattttattctgtacaaaactcaaattgcaagttggtacgaatgtcgctgtactaacatcattagctatgattccaggtattcatgatgcctacatattcaactttttgtctcgaacattgacagcaattattggactcgtgacatcaggtttaattaacttcatggtgtttccacctaagtattatggtcaggtcgaagaaaaattaagtaagacagatgccttgatgtataaattattttacaatcgctgccaagaacttatcttatcaagactgcaatctgataaaagcgaaaaagcatataaaaatattttcaatttaaataatcaagttgaaacgttaataagttatcaacgtgatgaattaagctatcataagaaaaaagaatgtgattggaaattactcaatcaattaactaaacgtgcatatacgaatcgtttgtttatcactcatttatcaaatatcatttacttgcctaaaaatactcgtgttaacttttcaggtgacgaaaaaatggcattgctaaaaattagtagtagcatcaaagatatattttatgatggttcttttaagagagaagatgattctgtagaaactttacgttcgactataaaagcacttgaaattagtggtgaaaatcaaattaaaagtcatatactatacgaagttctaatgatttatcgactgctagacagcagatatgcttaatttaagtaccttatgctaattggcaccatgggagtgggacagaaatgatattttcataaaatttatttcgtcgtcccaccccaactcgctttgcctgtagaatttcttttcgaaattctctgtgttggggcccacaccccaacttgcattgtctgtagaaattgggaatccaatttctctttgttggggcccacaccccaacttgcattgtctgtagaaattgggaatccaatttctctttgttggggcccctgactagaattgaaaaaagcttgttacaagcgcattttcgttcagtcaactactgccaatataacttcgtagagcatagaacattgatttatgtccccgcctctttttatcgtatatagcatgtccctttttaaaattacaagcataaatattcagactcaaatatagccacacgcctaaactacggagggatgtggctgtcttttttgattgtaattacatatcagatttaaatcattaatgtaaagaggctaattcattaataaatttagtaaaatctgatttagcaacatttatccttaatgaaataccagattctgttgccatgtttgaatgccttaaaccagaatcaaaatcaatataaatacaaagcagttcttgattaaaatcaataattgtaaaatgtaaatcaggttctataaaatatatttcagtaacaggattgtcgcaatccatatgtttcaaattgtccatgtcactatcaaagagtgcaaattcaaatttaacttcttgatcttcgaaagttgcactagtgtcgaaataataaattttattatcttcttcgataactacatcttttaaaataaatgttatcgatgttttgctatgtaaataagatgcatcttttaatatcactttagtaggcttcatcgtcaaattcctttcatcattcattttttcatgttgcataatcaccattactattgataattctaggatagatactcattgtataataattattcactagaacaaaaaaacacacatcaatttggttgtttccatccaaaataatgtgtgtgtttatacatatatgattaattactaaacttcatcgtttatcaatattaaatccattgatgcgatgttcagagttaacgagatttcttctgtctatttgctctgtctattaatacttgtttcgcttgtatttccgcttcattatctatttctttaggctcaaacggaatacccttacgttcacaagctttttctaacagataatcagtgatttcgtaatttttaggtaaaattggtccatgtaaataagtacctaataaatttttataatgaatgccttcttttttatcttcatcattattaccataaccaaaagtaacatgaccaagtgtaccgaaatcatgatatgttctaccaccgtgattttcaaaacctacaatagttccaaaagtatcactttcgataacaatatctcctgttaatcggtttgtctttgattcagtataaaaatctaaaatacctaacccttctaattctgtaccatcaggcgtgatatattttttccctaaaaattgatagcctccacaaatcgttaatcccggcataccatcttcaatcgcttctttaagtggtgtcttaattttacttaattcttttgttgctaatgcttgttctctatcacttccaccaccgataaagaaaatatcacattcatcaaaggtaataccttctgtttcattgatttctacgacattaactttaatatttcgttttttagcacgttgtcttaaagcaataatatttcctatatcactgtataaattcaatttatctgacataaaatgataaatagtcaattcatgcatattatgattgacctccttcaaacgaacggtttaattgttcaagcataggcgctaatgatgtatagtttggtattgcaactgtgaaacctttataatccatagtctttgccgttgctttataaatatcacgctcaactataattggtacttcaacctctgctaacttcaatcgcaattgaagttcttctgctcgtgtacctgtcacgatgatagcttcaatttgttgcttagataatttttcaaaatctgcatcataaatccatgaagtatctcgaccatctgcagcgttatcatttagcgaaataacatacactttttcgccttctaattgttcaccaactgataaacttgcattcattcctgcaggatttttagctaaattgatcatcgcttcttttcgttcttttttaaagtactgcatacgaccattgtctgatgtatacgtttcaaagccatttttaattgtttgttcatttaaccctagctctcttaaaacagtatatgctgctaacgcgttataagcgttaaagtcacctgcaattttcatatcatatttttcatcattgatatttaaatataaaaacggtgccacatcaaaacttgatatttcatattttgcttgctctcgtttgaaaccacactgacagtgataatgaccaatttgattataatgaatataatcgtattgcaataagcgaccacagtttggacaatatctactttcattcatcgtactttgttcaaattcatgggcatgtgctttcataccatagtacacaatcgtatcacttgcgattttcaaacgactcacaaatggatcatcagcatttagcaataatttgatgcctttattactaattgtctctgcaatgttattaaccataatatcaatttcaccgaagcgatccatttgatctctaaagaaattagtaaataccatcattgaaggtgtaacttcttttaacacacgtggaatcgaaccttcatcaatttcgattaccgcaattttagtcttaggtgttgattgcatgatgaatgcagaagttatacctgcagccatattagcaccttcattattgtgtataatttgaatattatttgcttttaaagtatgtccaattaagtttgaagtcgttgttttaccatttgttccactgataaatacaatatcatcaacttgctctgctaattttcttaatatatctgtatccacttttctagcgatttgtccaggtaaatctgttcctcttttacctactgctctacttgctttacgcgccaatttcgctagatggattgccgtccactgtctcatgtgtttcctcctcaaatttccactcgcatcattataacatgacaaggcaacttcaaaaaagtttctcaatcacaaattgatacagtgtttctaaattataatcattctcatttagataattaaaaatgatatttattctcaattaaatatcgctaaatgatacattttctcaattagagtgctaaaataaggcattaaattataattattattatttacaattgagaatgagtttgttatactaagtttaattcatagtaattttaatttacaaataagaggtgtatcaaaatgttaagtaaaaatttattagaagcattaaatgatcaaatgaaccatgagtactttgcagcacacgcatatatggcaatggcagcatactgtgataaagaatcgtacgaaggatttgcaaacttcttcattcaacaagctaaagaagaacgtttccatggacaaaagatttataactatattaacgacagaggtgcacatgcagaattcagagcagtttcagcaccaaaaattgacttttcaagcatactagaaactttcaaagacagcttatctcaagaacaagaagtaacaagacgtttctataacttatctgaaatcgctcgtcaagataaagattatgcaactatctcattcttaaactggttcttagatgaacaagtcgaagaagaatcaatgtttgaaactcacatcaattatttaactcgtatcggcgatgacagcaatgcattatatctttacgaaaaagaacttggcgctcgtacattcgacgaagaataattaaacatcactacaatagacagataaatatcatacgacatgataggcatttgggtcacttacaataacccaatgtctatattattttgctttacggagatcactagattcattttctgaatcattgatctgcgttttttcattttcaaggctaattattgtatttttagtcatttattttttaaactactaatgttaataactctaaatttgatgttgaattaatttgacgattttaaagcatatcatcatttactttttaatcagagttacatccaaatgatagatttcacgttataccttcacgtataatattatgtatcgtttgtaagcaaatgactaaaagtctattaatatatacatttaattaattgaaaggattgactacatgatacaagatgcgtttgttgcacttgattttgaaacagcaaatggtaaacgtacaagtatttgttctgtcggaatggttaaagtcattgatagtcaaataacagaaacatttcatactcttgtgaatccgcaagactatttttcacaacaaaatattaaaattcatggcatacaaccagaagatgttgaaaatgcacctacgtttgactacgtatttccatatatgatgcaatttattgcagatttacctgttgtcgcacataacgcggcatttgatatgaacgtcttacatcaaagcattcaaaatattggtttaccaactccaaatttaacttacttttgtagttatcaacttgctaaaagaaccgttgattcgtatcgatacggtttaaaacatatgatggagttttatcaattagattttcatggtcatcatgatgcattgaatgatgccaaagcatgcgcaatgattacttttaggctactgaaaaattatgaaaatttaacatatgtaactaatatttatggtaaaaatctaaaagataaaggctaggactaaataaaatactcccttcaaaagtaagcattgtaaaaatgtaaactttgcagggagctttattttatataaagtcatatatcgtcatatttttataagttgattgttctaaattacctacagtgacaccaataagtcgaattggtacatcagggtcttttaaatcgttataaagtaaatatgcaatattataaatatcttcttcagaactaaccgaatctcttaaactcatctgtttagatagcgtttcaaattgataagttttaattttaaccgttacagttttagctgacttctgtaatttatttagacgttcagctgttttacctgacaattcccatacttttcttaaaatctcttcatcatcattcacgtctgttgcaaatgtgcgttcagtccctactgattttcttactcttgatgatttcacttcactatggtcaataccgcgtgccttgttatataaaccccgacctctttttccaaacaaacgtattaattcaaattccgttttctcatataaatctctaccgttaaaaataccattatcatgcattacttttttggaagctttacctacgcctggaaaatctccaatatccaatgtcatcaaaatatcatggacattttgataatcaatcacagtcataccatcaggtttattcataccactcgctaatttagctaaaaatttgttataagaaacacctgcagatgctgttaaatgtgtctgctctagaatatcttttctaatatactgagcaattttcgaagcaggaaggtctggtctcactaattctgtaatatctaaatacgcttcatccaatgacatcggttctaccttatctgtataacttcggaaaatagacataatctgcgcagatgtttctcggtaagcaccaaaattacttgtgacaaagtatccatttggacataatttatgcgcttgtgacataggcattgctgaatggacgccgtattttcgtgcttcataggatgccgtagagacaacacccctactgcttgctttaccaccaacaatgactggtttccctttcaatttggggttatctctcatttcgacttgtgcaaaaaaatagtccatatctatatgaataattcgtctctcagtcaagtgctcacctccctactaatttttacttttataacgcacaaaaatatctcaacataattatacgctgtgtacgatttttttacataaatcttgcacttagcgataactatattgagataactacaagttgttataaaatcaattgctatttaagcatgatgatgaagacgattgagtaagaaaacataggtaatctgaaataattcaagcaaattcattttgttggtatcatcatattaaaatttattattgagtcggcttttgatgatacaaataaatactatcttcatcttgttgaacatatttaaaactactagatattgttaatgcaacaagcagaatatctataaagcaataagcggtatgcatactaaacataaaaataagtgatgaataaccaaataccttaattaaaataagcaagccagtacttaataggattagtggtgacagcataataattgagaattgccatttgttgaagcaagcatctgctgtttggaataagattctgtctttttttatattaaacataggtttgctatcttttttaaataaaagaaataatgctctatggataagttcatgtaaaatcaataaaataatgaatccagcaaacccatatacaagattgatgatgatattttgatcgacaaccgctgtgacacctaacgcccacttatacgtaaataaaatcacgaataacgcaataacaagttgcaagataataaaccttcgcatttgaaaattatttgtcgttaaatcaattttatgcattaccaaccctcccgatcatgacattcttattcttctttaaatatagtatacaatgtcacatttaatttaaaaagttcatatcaagaaagtaaattggctgtaataaaattttaatatacgacttctttcttcacttattaaggcgaaattttatctcaaatcatgtgcgctatttcaaattgaataatgccactgtctcaacatgtgttgtttgtggaaacatatctaccggtgttacctcttcaagttgatatttttcagctaataataatgcatcacgttgctgtgttgcgggattacatgaaatatagacaatacgcttaggttctaatgtaagcaaagtctgaataaacgtttcgtcacagccctttcttggcggatcaaccattacaacatctggtttaatcccttgtgctttccattgtaaaataacttcttcagctttcccacagacaaaagttgtattattgcattggtttatagtcgcattttgttgtgcgtcttcaattgcagaaggtactacttcaacaccgtatacatgttttgcaagtggtgccatatatagccctattgttccaataccacaataggtatctaatacaacttcattacctgtcaattgcgcatactcaattgctttattatataatttctctgtttgttcagaattaatttggtagaatgactgatcacttattttaaatgtactatctgttaattgatcaataattgtatctttaccatatagcgttatagattgacgtcccataataacattagagtggctatcattaatgttttgtttaatgcttgtcacattaggaaatgcatctaatatcttctcaacaacagcatttttttgtggccactttttaccattagttacaaaaataatcatcatttcgtctgtatgatatcctgttcttacaaccaaatgtctcattaaaccttttttcaattgttcttgataaatacttacatttaaatcttttaaaatagatttaacttcattcatcacttcttgatgttgtgaatcttgtattaaacaactttccatgtcaataatgtcatggcttctttgacgataaaagcccataataacttcattctgttcattcttaccaactggaatctgggacttgtttcgatatctccaaggatctgtcatgccaactgtatcgttaatcttagaattatcaaaatgcgcttttcgctgaaacaaattaatcacttgttcctttttcatttcaagttgtgcttcgtatgataagtgttgaagttggcacccaccacaacgttcataatatatacatggcggtgcaacacgattctcacttctcgtatttatattaagcaacttacctatcgcaaagttcttttttactttgataattttatattcaatttgttcattaattaaagcttgtggtatgaaaataggaaagcgatctatttttacgacaccatggccttcatgcgttaaatcaacaactgttcccgtttttatgtcatttttagctattgcttgcaaaattttacctccaaaatgaacaggttaggaacaaaattatgcgcttcctaacctgccattatatatttcactatttctgtttattcttcgattaaattgtcatcaacatgatcattatttattaactcttcatttacaatatcattaggtgcaaagacatctatatgacgttctagatttaagaaattcgctggtaatttaccaccatattctccatctacatttagttgtaagtctgtgaatgatgaaatattaattgcctttgctttttcataaataactttaggatgcttagtatgttctcctcttgaagctaaagtcataatatgaccaagttctgcaaggtttgatttttcaactataattaacgtaaaatagccgtcatctaacttagcgtccggcactaatttttcaaatcctgccattgaatttgttaaacctaaaaagaataataatgcttctccttggaaaacattaccatcatattcaattcttaaatctacagctttcatttgaggtaacatttcgaaacctttgatgtaataagcaaatggaccaacaatagatttcaatttactcggtgtttcataagagacttgcgtcaattgtccgcctgcagctaaattaataaagtatcgattattcattttaccaatatctactttagtagaatgaccttcaatgatgacatcaagtgcccccatgatgtcattaggtatatgcaatgcacgtccaaagtcattaacagtacccataggaatgacacctagcttaggacgattaggcttttctgcgataccattaactacttcatttaatgttccatcaccacctgcagcgattaatacatcataattttcatgcatagctctttctgcttcaagtgtggcatcacctattttctcggttgcatatgcactcgtttcatatcccgctttttctaattttattaaggcatcaggtaattctcttttaaatagctctttacctgatgtcgggttataaatgattctagcacgtttcctcatatcttatccctctacttaaaattcatatattttaacttcatctttgtttcgtctaatagggagtgggacagaaataatatttaacaaaatttatttcgttctaccccaacttgcattgtctgtagaatttcctttcgaaattctctatgttggggccccaccccaacttgcacattattgtaagctgacagaaagtcagcttctttgtttgggggccccgccaacttgcacattattgtaagctgacagaaagtcagcttctatgttggggccccactagaattgaaaaaagcttgttacaagcgtattttctttcagtcaactacagccaatataacattgtagtgcctaggacattgaatttatgacccaggctcagtcttatttcatcattcttaatatcgttaaagaccaacttgtatcttaaacaaatactatctcaatatgtacaaagcttgttatttattcagcattttttgccgttcttcattatatagacttcgtcagttatgctattttacctttaaaatgatgttgtaaatataatgttgtctttatacaaaaatgttttatacctttttattatacagtttgccttaatataattaaagctaacgcattaataaaattaatatttttaccattaacatgtacaatgaataaagttaaaagtaatttgacttctatagatataaataaaccctcgattgcatctaagtcagcaatcaagggtttattttttaaatcttcatagtttgatgatttaaattatcttttatctaattcttgttttaatagttgatttactaattgtggattagcttgacctttagacgctttcataatttgaccaactaagaagcccatagctttgcctttaccatttttgtaatcttcaactgattgttcgttattgtctaatgcttcatttacaaattttagaagtgttgcttcatcagaaatttgaactaagccattatcttccataatctgtttagcattaccacctttagctgctaactctgggaagactttcttcgcaattttactgctcattgttccgtcttcgataagtttaatcatacctgctaaattttctggtgttaatttagtatctaataattctacttgatttttatttaaatattcgtttacgccacccattaaccagttagatgttaatttaacatctgcaccgtgttcaattgttgattcaaagaaatctgacatttctttagtcaatgttaatacgtgtgcatcgtatgcaggtaaacctaattcatttacatacttagctttacgttcatctggtaattcaggaattgtctgacgaacacgctctttccaagcatcatcaatatataaaggtacaatgtcaggctctgggaagtaacggtaatcatcagaaccttctttaacacgcattaaaattgttttacctgtagattcatcaaatcgacgtgtttcttgtccgatttctccaccatttaacaattcttcttcttggcgtttttcttcatattctaaacctttacgtacatagttaaatgagtttaagtttttcaattcggctttagtaccaaatttttcttgaccatatggacgtaaagagatgttagcatcacaacgtaaagatccctcttccatcttaacgtctgatacaccagtgtattgaataattgaacgcaatttttctaaatatgcatatgcttctttaggtgaacgaatatctggttcagatacgatttcaattagcggtgtaccttgacggttcaagtcaactaatgaatactcacctttatgtgttgacttaccagcatcttcttccatgtgaagacgagtaataccgattcgttttgtttcaccgtcgacttcgatatcgatatatccattttcaccaattggttgatcaaattgagaaatttgatatgcttttggattatctggatagaaatagttcttacggtcaaacttagattctgttgcgatttccatatttagtgccattgcagcacgcattgcccagtctactgcacgcttattaacaactggtaagacacctggatatgctaagtcgataacatttgtatttgagttaggttctgctccaaaatgcgctggtgatggagaaaacatttttgagtccgtttttaactctacgtgaacttcaagtcctataactgtttcaaaatgcatgatttccactccttataatttttcataaacgtcatgtaaattgtattgtgtttcatattgataagcgacacgatataacgttttttcatcgaatggtttaccaatgaactgtaaaccgattggtcggccatttgattgtccacaaggaacagaaataccaggtaatccagctaagtttactggtgttgttaataaatcattggcatacattgttaatggatcatcaatttcttcacctaaattaaacgcagttgtaggcgctgttggaccaactactacatcataattttcgaatactttatcaaagtcatttttaatcaatgttctaactttttgagattttttatagtaagcatcatagtaacctgaacttaatgcaaatgtacctaagaaaatacgacgttttacttctttaccgaaaccttcagatcttgacattttatataattcttctaatgaatgagcttctttagaatgataaccataacgaattccgtcaaaacgagaaaggtttgacgaagcttctgatgatgcaatcacgtaatatgatggaataccaaatttagtatttggcaatgatacttcctcaacgacagcacctaaagattttaaagtttctacagcgttttgaactgcttcttttacgtcatcagctacaccttcacctaagtattctttaggtaatgcaacttttaatcctttaatatctttaccaatttcagatgtaaagtctacatcatcaactggtgcacttgtagagtcattaacatctgcaccagaaatagcttctaatacgattgcattatcttttacatttcgagtcaatggaccaatttggtctaatgaagatgcaaaagcaactaatccaaatcgagatacacgaccgtatgttggtttcataccgacaacgccacaatatgcagccggttgtctaattgaaccacctgtgtctgaacctaagctaaatggtactaagccagctgcaactgctgctgcagatccacctgatgaaccacctggcactgctttatggtcaaatgggttaactgtttttttgaaataagatgtttctgttgaaccacccattgcaaactcatccatatttaatttaccgattaaaacggcattttcattatgtagtttttccattacagtagattcgtaaattggcacaaaaccttctaacattttacttgcacatgttgtttctaatccgtttgtaataatgttatcttttatacccattggaataccaaataatttgccatccatttgatcttttgcttgtaattcatccaattcttgcgcttttttgattgcattttctttatccagcgctagaaaagacttaattgttggatcagtctcttcaattgcatcatatatatctttaacaacatcagatggtttgatttttttgtcttttattaaagttaataaattctcaaccgattcgtagcgaatgctcatcttacgcgtcctcctcattcatgattgtaggcactttaaattgtccatcttctgtttctttggcatttttcaaagctaattcttgtggaatacctttaattgctttatcttcacgtaaaacgttttgtaaatctaaaacgtgatatgtaggttcaacgccttctgtatcagcgctatcattttgttttgcaaaatctaaaatgctttctaatgtgttggccatttcttccgtttcttcaggagaaatttgaagtcttgcaagattcgcgatatgctcaacttcttcacgtgttacttttgtcattaataaaagcctcctttaagtcattcatcactaaattgtatcaaatttccaattaaaaatctaagtatttatgaggtgctactttaatttcatataaactgtataaacattatcattcgtttatcaaatcattttttatgaaaacaacactcttttaatattagacaacccaattcaatattatgattatgcaattttaattataaaaatttgctcatatccaaaaaatacgaaagcgctttctatattggtatgcaagtatttcaaaaagaataaatttaattttcctacttttctaaacatttatctttatgtataatgttttcaagtaactaaattataaattaaataaagggagtgtttatcatgcttacaatggggacagcattaagtcaacaagtagatgccaattggcaaacttatattatgattgccgtctacttcttgatactaatcgttattggcttttacggttacaagcaagcaactggtaacctaagcgagtacatgttaggtggacgtagtattggaccgtatattactgcattatcagctggagcttcagatatgagtggatggatgattatggggctacctggttctgtctatagcactggtctatcagctatgtggattacaatcggtttaacattaggtgcttatataaattactttgttgttgctcctagacttcgtgtttataccgaattagctggagatgcaattacattaccagatttctttaaaaatcgtttaaacgataaaaataatgtgttaaagattatttctggattgattatcgtagtattctttacattatatacacattctggtttcgtatctggtggtaaactatttgaaagtgcttttggattagattatcatttcggtttaatattagttgctttcattgtcattttctatactttctttggtggatatttagctgtatcaattacagatttcttccaaggtgtcattatgttaattgcgatggttatggtccctattgttgctatgatgaatttaaacggctggggaacgtttcatgatgtagcagctatgaaacctacaaatttaaatttatttaaagggttatcatttataggaattatctctctattttcatggggattaggttatttcggtcaacctcatatcattataaggtttatgtctattaaatcacacaagatgctacctaaagctagacgtttaggtattagctggatggctgttggtttattaggcgctgtggctgttggtttaacaggtattgcattcgtacctgcttatcatattaaactagaagatcctgagacattattcatcgtgatgagtcaagtactcttccatcctcttgtaggtggtttcttacttgctgcgattctagctgcaattatgagcacgatttcttcacaattacttgtaacatctagttcactaacggaagacttttataaattaattcgtggtgaagaaaaagctaaaacgcaccaaaaagaatttgttatgattggaagattatctgtattagttgtagcaattgttgccatcgcgattgcatggaatccaaacgacacaattctaaacttagtaggtaacgcttgggccggatttggtgcatcgttcagtccacttgtgctatttgcactttactggaaaggtttgacacgtgccggtgctgtaagtggaatggtttcaggtgccttagtcgttatcgtttggattgcgtggattaaaccattggcacatatcaacgaaatattcggcttatatgaaattattcctggatttattgtaagtgtaatcgttacatatgttgtaagtaaacttactaaaaaacctggtgcatttgttgaaactgacttaaacaaagttcgtgacatcgttagagaaaaataattcataagtcttaacaaattaaaaaggtactaatgttaatcaaaattatgactaacattggtacctttttattatctttaatttacaattaattactgtaaatatgaacttgcggttctttgtcatcttttgtcttactaattaaagcacgtggttggttaccatctttaatacgaatttcatagttatcgattttatcgaaatatttattcgcttgttcagtaacgtactgtgtaataccaattgtttcagcttgtccatagtaatcgattggtaaatctactactaatcgttgtggctttttatcaacaaatttaactttccctactgcttgtgtgaaattagaaaaatatgattgcaaattatcattaaattgcttgaaattattatttaaattttcatcataatctgctgctgttgaagaaggtaataaagctgatttttcattgatattatgccattcattaagctttgtttgactcttttctgcagtcgcttgagtgataaattcacctggtgtgattgaatcttcacttgattgcttataaattgcaaaatgaattggtatatcttttaaatcatcattttcacgtaaccttgataatatctcactagccatttgtttaccttgctttttaacttcgctatcatctagttttttactaaaagtcgatccatctttttcttttttatagtaataaacactattcatagctaaaccaatcgtcatacctttaatattcttaccttttgtatctccaccaccataaaaatcttgctctaaaatgttagataaataggctggtgatttttctgcaatcttttcaggatctgtttcaccttcgtgtgatggattaagtcctaaattttcattcgctttcttgtcttttttatctttttcagacattttatcgatttcacgttttgtatacttaggatttaaataggcattaattgttttcttgtccaaaaattgaccatcttgatacaaatatttatctgttggaaatacttctttacttaagttcaataaaccatcttcaaagtcgccgccattataactatttgccatgttatcttgtaaaagtcctcttgcctggctttctttaaatggtaacaatgtacgatagttatcaccttgtacatttttatccgttgcaatttcttttacttgatttgaactattgttatgtttttgattatcttttccagcctggtcatccttatggttaccacaagcagcgagtataaagatagctgtaatcaataatactaatgtacgcttcatcgacatacccctctaactatttaattcattttgcttatctacaaattgttgctctgtccaaatttcaatacctaaactttgtgcttttgttaattttgaacctgcatcttcaccagcaataacgacatctgtatttttagtaacgctacttgtaactttagcaccttgtgatgcaagccatttagatgcttcattgcgtgtcatttgatgtagcttaccagtcagtactatcgttttaccactaaattcaggatgtccttcaatatctgatgttttgatacctttataaatcatattaacatgtttatcttttaatttttgaattaaagcacgaatatcttcattttctaaataagtaactacagattgtgctactttatcacctatatcatgaatttctactaattccgcttcagttaccgttagtaatcgatctatcgtttcatatttttctgctaacacttggctcgctttaacacctaaatgcctaatacctagaccaaataataaattttctaaagagttgtccttagcttgttgaatggcagctaataaattatcaacttttttctgccccattctgtctaaaggtaataaatcttcttctgttaaatagaaaatatcagcaacatctttaattaattcgctttgataaagctgttgaataattttagtgcctaaaccatcaatattcatggcttgtcttgatacaaagtgaatcaatccttcaacaagttgtgcttggcattttggattaatgcaacgaagtgctacttcgccttcaatacgtactaattcatgtccacaacttggacaatgggttggcatatgatatgtgacagcatcctcaggtctacgttctggaatactacgtacaacttcaggtatgatgtcacctgcttttttcactacaacactatcaccaattcgaatatctctgtcatgaattaaatcctcattgtgcaaagatgctcttgatacagttgtaccagctacttttactggttctaaaatagcagtaggtgtgactacacctgttcgtccaatacttaattcaatatctaataatttagttactacttcctcagctggaaatttataagcaatggcccatctaggagatttttgtgtgaatcccatctcatcctgttgatctaaatcattaaccttaataacaatcccatcaatatcataaggtaatgactctctttggcttgtccatttttcaatatactctaaaacaccatcgatattatttacacgcgctctatttttattcgttgtaaaacctaatttatctaactcatctaatgcttcactttgcgaacgcgcattgaaatcagtgaaatcattgacactatatataaatacgcttagctttcgttttgccgttaatttagaatctaactgtcttaatgatcccgcagcagcgtttcttggatttgcaaataactgctcatcatttttttctttttcttcatttaatcgtaaaaatgaacgtctcggcatatatgcttcaccacgaacttctacatttaatggttctttcattttcaaaggtatcgcatgaattgtttttaaattttcggtaatatcttcacctgttgttccatcaccacgtgttaaaccttgaacgaagtatccatcaacatatttcaatgatactgctaagccatcaatttttaattcgcacatatattcaacgttgccaatttgttcacgtatgcgttggtcgaattttctcaaatcatcctcattaaatgcattccctaaacttaacattggcgtgtcatggttgactttattgaaagaggcttgggcttcaccgccaactctaactgttggagaatctacagtcttatactcaggatgctcctcttctattttaatcagttcatgaagtaatttgtcatattcactatctggtacagatggattatcctctacatagtattcataactgtattgatttaataaatcatgtaactcgttcacacgagacgataaatcagccatcccttaatcctcctttttttcaattggtgcaaattgcgctaacaaacgttttggcccttgtgatttaaagataatatctagttcgattgagccatttttctcgtttacattactcaccatgccttctccccaggctttatgcatcactttgtcacctacattccaatcagatgacaatacttgttttttcgttgacgttgttcgttgactaaatccgcgtttagcaaaaggttttgccttaggttgtatcgtttgtcgtttgccacttgaatgattttctaatagtgattctggaatttcctttaaaaatctggatggcatatttgactgagggcgaccaaataacattcttgatgtcgcatgagtgatatataacacctcttcagcccttgtaattgctacataacaaatacgacgttcttcttgcatttcatgatcatcttcactcttaatcgctctaatatgtgggaataaagattcttccatccccattataaagacaattggaaattcaaggcccttagccgagtgcatcgtcattagtgttacgccattttcagtatctgcctcatcaatatcagctactaacgataaatccgttaaaaagttaattaatgactgttcttctaatggggtattttcctcatagtcttttggtactgacataaattcatcgatgttttctaatctacttcgagattctaatgtattttcacgttcaagcatttctcgatagccagacttttgtaatacttcatcaactatttcatgaatttctaaaaattcttgttcttttatcaagctttggattaactcgtaaaaattaagacactcttgtgtcaccttttttgacaatccgataaaatcagcttctccaagtgcatcaaacatactgatattgttttgaagtgcatagttttgaactttttcaacagatgaaggacctacacctctttttggaacattaataatacgttgcaaactaatgtcatcattactattggcaattatacgcaaataacttaataaatctttgatttctttacggtcatagaacttttggccaccaaccattgtgtatggcatattagatttcatgaatgtttcctcaagtacacgtgattgtgcattcgttctatataaaattgccatatcttgatatttcttaccattacgttgatgcttcataatttctcgtattacaaattccgcttcatcacgttccgtcattgcttcatagtaatgaattttctcaccattcgtatttgcagtccacagtccttttggcttacgttcagaattatttttaatcacttcgttagccgcatttaaaatcgttttcgtcgaacgataattttgctctaaaaagattgtattcgcttctggatagtctttttcaaatgataagatattttgaatatcagcaccacgccaaccataaattgactgatctgagtcacctacaacacataagtttttaaacttacttgctaataatttaactaatgtgtattgtgctttattagtatcttgatactcatctacatgaatatattggaatttgttctgataatattctagaacttctggtacacgctcaaataagttaatcgttgtcataataaggtcatcaaaatctaacgcttcattacgtgacaattggcgttgatatccactataaaccgttgctaccatttgcgagtgataatctgtggcttctttttgagcatctgcaggtgttttaagttcatttttcaaattactgatcgcaccgataaacatacgaggttcaaactttttactatcaatattttcattttttaagacgtctttaataacagatttttggtctgtaggatcaattatcgtaaaattgcgttctataccaattcgatctgcatcacgacgtaaaatacgaacacacattgagtggaatgttgacatccaaataacttctgcttgatcacctactaatttttgaacacgttctttcatttctcttgcagctttatttgtaaaagtaatagccaaaacattgtatggtgagacatctttttcgtctaataaataagcaattctatgtgttaaaacacgtgtcttccctgaaccagcacctgccataattaacaatggtccttctgttgtctttacagcttcactttgctctgtattcatatgatttaataacgcattcatttactagactcctttatttttactgtttttaaagcttttttaatatctttataaataatatcaccgacgataattgtatctgcaatagctgccatctctgtcgcttgttgttctgaggaaataccgccaccataaaaaagttgcgtttctgttagatgttctgagacagcttgaacctttgatacgtcgccataaatgccactatactctatatacataaccggtaatcgatacatatgattgaccatttgggcatatgcttctaaatcttctgttgttaaatctgtatttgctttggtatgttttgccattttgctatcagcattgcacacgacatacccttcaaatattacttcctcaaaatctatactatgtccatatgttttaagcgcttctaataatgtaccattgtgaaatacaacatctgtactgttcagtactgtaggtacaaaataaaaatcaaaaccaggcattacactttcgatgtttgatatttcaagtactaaaggcaatgggtatcttcttactctgctcattaaatgaatgacattatcttcagtaacgtcatcagttccaccaatcataattgcatctgtttgagacatacaaatcgcatctaaatcatcatctgaaatatgtttagctgggtctaatttaaaaatatggcgccattttttaatgtcatacattttccgaaactccttttttaacatacatatgattatagcatttttaagtgtcgagttctaaagacttaatatgaaatttaagttcttttactctgtaaattttttcgtgaaaaaacaatgattatctaccttattagtgcagatagataaccattgtttatcgttcatttattattcatttgtttcaatattcatacgatctaaaatcattgtataagcatcattaccccattgtaatgaacgcttcactctagaaatcgttgcagtcgatgctccagattcttgttcaatcgttgcataggtataaccttgcttaatcattttagcaacttgtaatctttgagacagtgattgaatttcatttacagtacacaaatcatcgaaaaattggtaacattcttctctattttctaacgttagtattgcatcaaacaattcatctaacgctgcacctcgtaatttttcaatttgcatatcgaaacaacccctataattttattctttatgtcattttaacgcattaatctattaaagtgtagcgatttatattttattaaatctgaatcgttactttatttaattttatgctaatccagcgcgttcgaaaatagtgtcaacttgattcaaatgatgtttaggatcgaaacattcatccaattcttcttttgttaaaacacttgtaatagactcatcttgttcgattaattcacggaacggtgttttcgtttcccaagatatcatcgcttttggttgtactttgtcgtatgcttcttcacgaaccatacctttattaattaatgctaataagacacgttgtgagaaaatcagaccaaatgttttatctatgttattacgcatattatcttcaaatacagttaaacggtccacaatatttgtgaaacgattcaatgcataatctagtgctattgtaacatctggtaacataatacgctcagcagaagaatgagaaatatctctttcatgccataatggcacattctcataagctgtagtaatataaccacgaatgactcttgaaatacctgtgatattttcagaaccaattggatttcgtttatgaggcattgcagatgaacctttttggccttttgcaaatgcttcttcaacttctctcgtttcggttttttgaaggttacgtatttcaacggcaaatttttctagtgatgtcgcgattaatgctaatgtcgcaatatagtatgcatgtcgatcgcgttgcaatgtttgcgttgatacaggcgctgtgccaatacctaaatgtttacacacataactttctatttcaggaggaatgttagcaaaagtacctactgcaccactcattttccctacttcaatttcttctcttacttgtttgaaacgttgtaagttacgttgcatttccgtgtaccacaatgccattttgacaccaaatgtagttggttctgcatgcactccatgtgtacgtcccatcatcaatgtatatttataattttttgctttttcagctaaaacgtcgataaatctttctaaatctttttcaataatgtcatttgcttgtttaataacgaaacttaaagctgtatctacaacatcagtagaagttaaaccataatgtacccacttacgttcttcacctagcgtttcagaaacttgtctagtaaaggctacaacatcatggcgcgtttcttgttcaatttcttgtgcacgttcgacatttacctttgcgttttgacgaattttttgtacgtcagctttcggtatatgtcctaattcactccatgcttcacatgctaaaatttccacttctaaccatgcttcatagcgattttgatcagtccaaatattagacatttcttctctagaatagcgttcaatcatttttttaactcctatcgtatgtatactcgaattttcaaaaacagaacattttttaataaaaataaacaaaaagttcgtttttaactctactcttcacagtttaacagaattggttataaatgtataaaaaatttccgtatattctcattctattttattttttacattaatacaattatctatggcagattaatactgatttctaattgtaaatgttcgcaatactttaatctaattggtatttataatgatccattgagaatatatttttgcattttagtttttctcccctcaactacactatccaactttttattacaattaggacaatcaatagctttagtaataccagaatttattcactttacttctcctattgtatggaattttcaacaatctacttttcctagtttcataatatttcttcttacatttcataatatgttttaaaattattcgcttctaatataacaaattttctactcacaaaaagaatatatattctattgcataggtgtggcattttaaatataagacattaatattgaactccagaatcgtataaatacgaaactgattatagaaaaatacgcagagatttttttaatagtaaatttttatagaaagacataaattgactacgcttctttcaaaatcgactaatatattttcatgaaactttcgatcatattaattattgaatgagatgtttgcaatttagtaaataagctactaaattattacataaactgataatgtgtaaaaattaattattttttaaacatagattaaaattttatattgaaactcttaactaaatttaatataattattttataataaaataaaggagtttttatatgaaaagaaactttccaaaattaatagctttaagtttaatattttctttaagtgttacccctattgcaaacgctgagagcaattcaaatatcaaagcaaaagataagaagcatgtgcaagttaatgtcgaggacaagagtgttcctactgacgtacgtaatttagcgcaaaaagactatctttcttatgttacttcacttgataaaatctataataaagagaaagcctcgtatacacttggtgaaccttttaaaatttataaattcaacaaaaagagtgatggtaattattattttccagttttgaacactgaaggtaatatcgattatatagttacaatttcaccaaaaatcactaagtattctagttcatcttctaaatacacaatcaatgtttctccatttttatctaaagtcttaaatcaatataaagatcaacaaattactattttgacaaactcaaaaggttactatgtggttactcaaaatcataaagctaaactagtactaaaaacaccacgtctagaagataaaaagttaaaaaagactgagagtatacctactggcaataatgtaacgcaactaaagcaaaaagcttctgtcactatgccaactagtcaatttaaaagtaataattatacttacaacgagcaatatataaataaacttgagaatttcaagataagagaaactcaaggtaacaatggttggtgtgcaggctatacgatgtctgaattactaaatgcgacttataatactaacaaatatcatgcagaagctgtgatgagatttttacacccaaacttacaaggacaacgattccaatttactggtttaacgccaagagagatgatttattttggacaaactcagggaagaagtccacaacttcttaatagaatgactacatataatgaagttgacaatcttactaaaaataataaaggaattgctgttttaggtagtagagtagaatcaagaaatggtatgcacgcagggcatgccatggcagttgttgggaacgctaaattagataatggacaagaggttataattatatggaatccatgggataatggttttatgactcaagatgctaaaaacaatgttattccagtatccaatggcgaccattatcgatggtattcatctatttatggttattaaaatttgtattttagaaaggtaaataatattatggaacaaattgaattatttagtattgataaattcaaatgtaattcagaggctaagtattatcttaatattattgagggagaatggcatcctcaagatttaaatgatagtcctttaaaatttattctcagtacctcagacgattctgattacatttgcaaatatataaatacagaacacaaacaactcacattatataataaaaataatagctcaattgttattgaaatatttataccaaatgataataaaatactactaacaattatgaacacagaagctttgggaacttctcctagaatgactttcattaagcataagtcataagactatctagatatgattaagtaaactattaatcttattaaaggtctctaggaagaaaaaatttcatgcgatgagattgttttagaaaaagcgacgatatatataatctaacaataatttttaaaatattaagaacccccagcatatgctttatatagcttgctgggggtttctcatacaatatggatcgagcatcttgcatgtataaacaaataggctattcaaagtaaaattactcaaactttgaatagcctttcctcttcaaatagtctttatttaaattggattatgttattggattttcttacctacaaaaacgatttcttgatgtgatacttcaaccgtgccatctttttgctcttgaaacacgggtttttcaatacgttttaccggcatatacccttgcattttcattcgtgacaaacaatcagcaattgtttcattctcatttactttgaatttcatgttctactacactttccagttcttctggttcataatctttaagctttctacgacgaatgcctttagtccagaatccaccatgtatgtttcgaggttcatacgcaatgataaatgctttcggatctaaattttttatcgtatccatcaatttacgttcatattttcttggtgttaaaatttgcatcaccatacgactaccatctctaccaaacgcagcatagtgcgtaacgccatatcctaaatttcgaagttcattcggtaaatctaactcatattctgctgaagttacatttacaactgtataacctaatgccagtttttcttctattttcataccaacaatgatacctattgaaaaaccaaatgcgtaggcaataatattttgaatatggtctaaattagacataaccaaacctaaaccaacgatataaactaatacttctaaaaaactaactgatgcagcaatataacgataacctttcaacgttaaaattgttcgcatcgttaaaaacgttacataacaaatgttaatgataaatatagttagtaccattaaccatggattttctgttacgaatgacataaggcgccccactctctttcaattacactttaaataccaaactgcttcaacctaaccttaatgaatgcatattaatataatatagtacgaaaactctcataaataaatagcgaatttgtcataaataaaaatttattctcaaatgaacatacttactttagttcatacactttcaatttatacactgaagtagtctagctgaatgtggtttaatgttattaattctaactcatatttaatttaagtcacacgttagaagaaaaaattaaattaggattttggccacgtgtatcttgtatatgcaagttcacgtttgtgtgcatttcgtatataatgattttcaattactttttgttcttctggcgtaactggcttaccttctaaataattatcaatcgcctcataagttacacctaatgcatcttcatctggaagctgtggtttatcatcttctaaatcagcagttggcgttttttcatataattcctttggcgcaccaagatacgctaataattgacgaccttgtcgtttattcaaaccaaatataggtgcgatatctgcagcaccatcaccgtacttcgtataaaacccagttatattttcagctgaatgatctgttcctactacaataccttgtcggtttgaagcaattgaaaattgtactttcatacgttcacgcgctttttcatttcctttttggaaatctgtaagaacaataccggcttcttttaatgattgcacactttgatcaactgcaggcttaatattgactgttactatttcatctggttcaatgaatcgcaaagcttgctcaacttcatcagcatctttttgaactccataaggtaatttaactgcaataaacgtacaatcaatgccttcttcacgtaattcgttaacagacatttgtactagttttccaactaatgtagaatcctgtcctcctgaaatacctaacactaaagattttataaatgaatgtgattgtacataattttttataaattgctttaattccataatttcttcagcactatcgatacgctttttcactttcatttcttgtacaataacgtcttgtaatttactcattatcttcttccatctccttaacgtgttccgcaacttcaaaaatacgtttatgtttattatcccaacatgccttgcttaaatcgactggatattcttgtggattcaggaaacgcttattttcatcccaaatagattgtaatcctagtgctaaatattcacgtgattcatcttctgttggcatttgatatactaatttaccattttcataaatattatgatgcaaatcaatggcttcgaaagattttataaatttcattttataagtatgcactggatggaataattttaaaggttgttcatcgtatggattttcattttccaaagtaatataatcgccttctgccttacctgttttcttgtttataatgcgatatacatttttcttacctggcgtcgtaaccttttcagcgttatttgataatttaatacgatcactatatgaaccatcttcattttcaatagctacaagtttatatactgcacctaatgctggttgatcgtatcctgtaatcagctttgtaccaacgccccaagaatctacttttgcaccttgtgctttcaaactcgtaatcgtttcttcatccaaatcattagacgcgataattttagtttcagtaaatcctgcttcatcaagcatacgtcttgcctctttagataaataagcgatatctccagaatctaatcgaatacctacaaagttaattttgtcacctaattcttttgcaacttttattgcatttggcacgccagattttaaagtatggaatgtatctactaggaacacacaatttttatgtctttcagcatattttttgaaggcaacatattcgtctccataagtttggacaaatgcatgtgcatgtgtaccagacacaggtataccaaataatttccccgccctaacattacttgtagaatcaaagcccccgatgtaagcagctctagcgccccacaatgctgcatcaatttcttgcgcacgacgtgtaccaaactccattaatttatcatttgatgcaatttgacgaattctgctagcctttgttgtaattaatgtatggaaatttacaatgtttaataaaattgtttctattaattgcgcttgaatcaatggtgcttctacgcgtaacaatggttcgttaccaaagcataattcgccttcttgcatcgaacggatgctgcctgtgaattttaaatcttttaaatatgataagaaatcatccttgtagccaatagactttaaatattccaaatcagattctgaaaatccaaaatgttctataaaatcaatgacgcgttttaaaccattaaaaacagcatagccactattaaatggcatttttctaaaatacaaatcaaatacagccattttttcatgaatattatcattccaataactttcagccatatttatttgatataagtcattatgtaacattaaactgtcgtcttctaattggtacacttgtatctctccaatcgacctaaatattttcttacattttatcataattcatttttttatatacataagagccccttaatttccatacttttaattaaaatcaaccaacaatttaatgacatatacataatttttaagagtattttaataatgtagactataatataaagcgaggtgttgttaatgttatttaaagaggctcaagctttcatagaaaacatgtataaagagtgtcattatgaaacgcaaattatcaataaacgtttacatgacattgaactagaaataaaagaaactgggacatatacacatacagaagaagaacttatttatggtgctaaaatggcttggcgtaattcaaatcgttgcattggtcgtttattttgggattcgttaaatgtcattgatgcaagagatgttactgacgaagcatcgttcttatcatcaattacttatcatattacacaggctacaaatgaaggtaaattaaagccgtatattactatatatgctccaaaggatggacctaaaattttcaacaatcaattaattcgctatgctggctatgacaattgtggtgatcctgctgaaaaagaagttacacgcttagcaaatcacttaggttggaaaggaaaaggtactaattttgacgtgttaccactgatttaccaattacctaatgagtcagttaaattttacgaatatcctacttcattaattaaagaagtacctattgaacataatcattatccaaaattaagaaaattgaacttaaaatggtatgcagtccctatcatttccaatatggacttaaaaatcggtggcattgtatatccaactgcaccctttaacggttggtatatggtaactgaaattggcgtacgtaactttattgatgattaccgttacaatttactagaaaaagttgcagatgcgtttgaatttgatacacttaaaaataattcatttaataaagatcgagcacttgttgaattgaactatgctgtgtatcattcctttaaaaaagaaggcgtatcaattgtcgatcatttgaccgctgcaaagcaattcgaactattcgaacgtaacgaagcacaacaaggtcgtcaagttaccggaaaatggtcttggctagcaccgccattatctccaacattgacgtcaaattatcatcacggatatgacaatacagtaaaagatccaaactttttctataaaaagaaagaatcaaatgctaaccagtgccctttccatcattaagttagtagaggtgtagcatatgcaattatattatttaggccctaaaggtacattttcatatttggcttgtcgtcagtatttttctgaaaatgaagcaacttttcaaccaaagtcaaatttttttgaagtcatcaaggcagttgcagatgatgacacatcgattggtgttgtccctattgaaaattctatagaaggaacaatcaacattgtggcagatgcacttgcacagcaagatgtctttgcacacggtgaaatacgtttagatattaactttgcattatatggtaatggaacagattccatttctgatattaaaaaagtgtattctattgcaccagcaatcagtcaaacaacaaattacatacatcaacatcaatttgactatgattatgtcgacagtacaattcaaagtttgactaaaattgaaaatggcgttgcagcaattgcacctttaggtagtggcgaagcttatggttttacacctattgatacacatattgaagactatccacataacgtgacacgttttttagttataaaaaatcagcagcaatttgatcaaaatgcgacatcattgatgtttttaattacaccaatgcatgataaacctgggttgttagcaagtgtgcttaatacatttgctttgtttaatattaatttatcctggattgagtctcgtcctttaaaaacacaattaggtatgtatcgatttttcgttcaggctgattctgcaattacaaccgatataaagaaagtcattgctattttagaaaccttagatttcaaagtagaaatgattggtgcttttaattaaactttattttctaggttctacaatttaaataaaataaagagtcaaccaaggattaaaataggaatccatccttggttgactttcttttgtttgtattgtttttacacgatgctgcggtatacgtttcgttaccactcgtccaagcaattgctaatgtaaccttttatttttcgttctaatctgcaattactatttcaatggcagtggttgatttatatcaatacctaaaactataggcattacataatacacgactaaaataataattattgcactgattaagtttacccagaatcctactgatgccatttgtttgatagatattttaccagaaccaaagataattgcattcggtggtgtccctactggtaacatgtatgcacagttagccgccatagctgcaggtgccataagtagtaatggatgcactccaacagcaacagacaacgttgctaaaatcggtaaaatcatcgttgcagttgcagtattagatgtcacttcagttaaaaataagacaaagattgttatgacaattacaataagaatcggactaacaccatttaatgatttcaactgttcgcctaaccattttgctaaaccactttcagaaatacctttcgctaatgctaaaccgccaccaaataaaattaatacaccccaagggagctcttttgcaacttcccagtcaatgatacggcgatgtttttcagtatttttagctggaataataaataataatattgatataaaaatagcaatcgtaccatctgcaacagatgacgtaacttcccattttttcagaagaaactctcttgtaatccataataagctagcaagtacaaagatagtttgtactaccttttcttcatacttcattttgccaagctcgtctaacttttgtttaattaacgtctgaccaccaggtaaatatttcaaatcatgtctaaacgcaacatatcttaaatagagccaagtaatacctaacaaaacaatgaccgttggaatccctacaatcatccatttagcaaaactaatttcatatccaaaatgttgcatgtattgtccttttaaaataattaatggcggggttccgattaatgtacccaagccaccaatcgtacctgcatagccaattgctaaaactagagatttttcaaacttttgaatacttgtttgattcgtattggcttcttgtaaatcatgtgcttccttaataattgctaaaccaatcggaatcataatcattacagctgcagtgttcgatacaaacatagataagaatcctgttgccaccatgaatccaagtaatatttttgaagtgcttgcaccaatcaaattaataattgtcaacgctactctcgtatgtaaattccatctttccattgcaattgccaaaataaatccacctaaaaacaaaaagataatatcattgccatattcggatgatacttgttctggtgtaagtatatgacctaatggtaataacacaattggtaataagctcgttgctgcaataggaattgcttcagtaatccaccaagtcgcaatccataaagtaatcgctaaaacatagacgcctttccaaggtaagtcttgtggatgaaagaataataatgttaataggaaaagtaatggacctaatattagtccaataagttgtcccgcactaaacggtttctttttctttgattttgaaaagaatgttaaataccttttcgatatcattgattgatgttgattgaaataagccataaatttccccctcatgatgattatgacaagctacttcaactcactatattagagtatagaaagttgtctatcttgtattatcattaccgtcaaaataccccttttatcagataattgggtttattatagcatatttataccgttttatgaatgcgctttcaaaaattatctactattcttaatcctaatgtcatgcgaaactttttacttttttatttcatctacattgattgtagtaacttgaatacccgcttcaacaggacttaaaaacactgtatcaatatcttctaaatgaattgattgagtcgaattattgaatgtattcccaacgattaatacatctttatgtttaacattattataattacgtacatgtatcgcatctttagacattgatcctttaaattcatttccaattatattcatatttatgcctgcttgggaacctaagtcttttcctgtcatcacatctgctgcatttttaccatctctaactcctaaatatctaatgccaccctcacagttaataaacttattattaataatgaaagcatctttatacttcaagggagttaatgcataaccttgtatatcttcaaatatattatttctaatatgaatattctcatagtatcgattatgtctacttgcatgtgagccaatagcacgattccaacttcccatttcgggcaattctgaaggtccaaaataacaatcttcgataatgacatttttcgttatcgtaccatctgtcgttccgaattttggaaaagcaccaggtacttgaatgtctaattgtattgcttcagaataaaagcgttcgccactatagtctatgaatccttcaaatgaacagcttttaatatagagtccgttaatcccacaagcatcaattgcatgaccactcactacattcttaatggtcacacctattaattgaatatcttcagcatgcccaatgcacatagctgtattgttataaggatacgatacaccattcatatcaaacttgccgcctttaatatgaatatgactgtgtccattataaccacgataaaaaccaaagcgacgaccattttttaataaaggaccagaatgacatcggcgtaaaatagtttcattatctaacaaaagtgttgtattgccatatatcgttaatggtttgcaaatatcatacgtccctttcggtatataaactgtcgttggtttacatcttccacgatttaacgcacgttgtattgctcgagtatctttagttttgtttatgcctgttaacccataatctttcatattgatatacataaatcgtcatcctttgtctattttctaattactcatatattaaccaattattcaaattataatcgtgttaggttgatttaacagatagtcataaatctcgtgatgccatctattagcatttttatattcaaaacatcaacacttgatattagttctaagtttgtcacatttagtattctattacagctattttaaaactatcgcaaaaacttcttatattatttgttgattgcgtgatttgctcttccaaaaaagttgattaatctatatacttaatctatatttatatattaaccattagggttaaaaattactctagcatttatgaatagatgggagtttattttattattatataggagagatgttgaatgacacatcgcgcactattagttgttgactattcatatgactttatcgcagacgacggcttactaacatgcggtaaacctggacaaaatattgaagattttattgtttctcgtatcaatgactttaattattatcaagaccatatattctttttaatggatttacattatttacatgacattcatcatcctgaaagtaaattattcccaccacacaatatcgtagatacaagtggtagagaattatacggtaaagtaggtaaattatacgaaacaattaaagcgcaacctaatgtacatttcattgataaaacgcgctatgattcgttctttggtaccccgcttgatagtttattgagagaaagaagtattaatcaagtcgaaatcgttggtgtatgtaccgatatttgcgtgttacatacagcaatttctgcatacaacttaggttataaaatttcagtacctgctgagggagtggcttcatttaatcaaaaagggcatgaatgggcacttgcacatttcaaaaactcattaggtgcagaggtagaacaacacgtttaaatcgtgctaaaataattataaagaatacaatttacaagggagatatttgacaatggctaaaacatatattttcggacataagaatccagacactgatgcaatttcatctgcgattattatggcagaatttgaacaacttcgaggtaattcaggagccaaagcataccgtttaggtgatgtgagtgcagaaactcaattcgcgttagatacatttaatgtacctgctccggaattattaacagatgatttagatggtcaagatgttatcttagttgatcataacgaattccaacaaagttctgatacgattgcctctgctacaattaagcatgtaattgatcatcacagaattgcaaatttcgaaactgctggtcctttatgttatcgtgctgaaccagttggttgtacagctacaattttatacaaaatgtttagagaacgtggctttgaaattaaacctgaaattgccggtttaatgttatcagcaattatctcagatagcttacttttcaaatcaccaacatgtacacaacaagatgttaaagcagctgaagaattaaaagatattgctaaagttgatattcaaaagtacggcttagatatgttaaaagcaggtgcttcaacaactgataaatcagttgaattcttattaaacatggatgctaaatcatttactatgggtgactatgtgactcgtattgcacaagttaatgctgttgaccttgacgaagtgttaaatcgtaaagaagatttagaaaaagaaatgttagctgtaagtgcacaagaaaaatatgacttatttgtacttgttgttactgacatcattaatagtgattctaaaattttagttgtaggtgctgaaaaagataaagttggcgaagcattcaatgttcaattagaagatgacatggccttcttatctggtgtcgtttctcgaaaaaaacaaatcgtacctcaaatcactgaagcattaacaaaataatactatattactgtctaattatagacatgttgtatttaactaacagttcattaaagtagaatttatttcactttcaatgaactgttttttatttacgtttgactaatttacaaccctttttcaatagtagtttttattcctttagctaccctaacccacagattagtgatttctatacaattccccttttgtctttacattttcttaaaatatttgcgatgttgagtataaatttttgttttcttcctacctttttcgttatgattaaagttataaatattattatgtacacgattcatcgctctattttcaactttcaacatatataattcgaaagaccatttaaaattaacggccacaacattcaaatcaattaatcgctttttccaaaataatcatataaggaggttcttttcattatgaatatcattgagcaaaaattttatgacagtaaagcttttttcaatacacaacaaactaaagatattagttttagaaaagagcaattaaagaagttaagcaaagctattaaatcatacgagagcgatattttagaagcactatatacagatttaggaaaaaataaagtcgaagcttatgctactgaaattggcataactttgaaaagtatcaaaattgcccgtaaggaacttaaaaactggactaaaacaaaaaatgtagacacacctttatatttatttccaacaaaaagctatatcaaaaaagaaccttatggaacagttttgatcattgcaccatttaactatccttttcaactagtgttcgaacctttaatcggtgctattgcagcaggtaatacggcaattattaaaccatctgagttgacgcctaatgttgcacgagtgattaaacggttaatcaatgaaacatttgatgcaaattacattgaagttattgagggaggaattgaagaaacgcaaacgttaattcacttaccttttgactatgtcttctttacaggaagtgaaaatgtaggcaaaatcgtttatcaagctgccagcgaaaatttagttcctgtgacattagaaatgggcggtaaatctccagtcatcgttgatgaaacagcgaatattaaagttgctagtgagcgcatttgttttgggaaattcactaatgccggccaaacatgtgttgcaccagattacattttagtacacgaatctgtaaaagatgatttaatcacagccctatcaaaaacgttgcgtgaattttatggtcaaaatatacaacaaagtccagattatggccgcattgtaaaccttaaacattatcatcgtctgacttcattacttaacagtgcacaaatgaatattgtatttggtggtcatagtgatgaggatgaacgttatatagaaccaacattgttagatcacgttacaagtgattcagcaattatgcaagaagaaatttttggtcctatcttaccgattttaacgtatcagtcattggatgaagcaatagcctttattcaccaaagaccaaaacctttgagtttatatttatttagcgaagatgaaaatgctacacaacgtgtaataaacgagctatcatttggcggcggcgctattaatgatacattgatgcacctagcgaatcctaaattaccatttggtggtgttggcgcctcaggtatgggacgctatcatggtaaatattcattcgacacttttacacatgaaaaaagctacattttcaaatctacacgattagaatcaggtgtccatttaccaccatataaaggtaaatttaaatacatcaaagctttctttaaaaattaatttttgagacaaaaataaaccatgcttccataatttgatgttcttgaaaacaataaatttcaaggtatacacaaattttttggaaacatggttttctttttatcatgattaattaaagattaaaatatgacacatacaccttcagatgctacacgagtgttatcacatagcgtaattttacctgtttctttatttctttcgaaaacagttacaactgaatctccttgctcatgagcacaaactaaaaggtcatctgatgaggcaatattaaaatctcttgggaattgaccaccactttcagtaattgttactagttctaagtgttgaccattatcaagaactttaaaaattgcaatgctatcatgccctctattagatacatataagaattgttgatcatgagataaacgcactgctgcaagtttagtatctccatcaaagttttcaggaattgttaaatgacgctcgagctcttcaaatttaccgtcattatattctgcaacactcacagtatttgataattcgtgtacgacataagcaaattttccattatcatgaaattcaatatgtcttgtcccatcactatctttaaataaagattctttataaaattcaaacccgttgtcatcaaatttataagtaacgatacgatcagcacctaaatctgttactgcaacgtacttaccatctggagtttgattaatataatgtgcgtgtggatgatcttgtctttcatgtgtacctgttggaaaatcatgtgcaagttcttgaattagacgtataatttcacctgtgtgcgtatttaattcatacatacgtatgatgccagcaccatataccgcttcaaataaatatcgtttatcttctgaaatcgatacataacaacctgtaccagcttttgaagacaaacatttatttaataaatgcaattcaccattgtcatcaattttcaaacttgcaacaccgcattgttctccttctttgttgattccatataaaacttcattattacgcaccaaatatgtagacgcttctaattcaaatcctgtttctaataaatcaatacgtgactgattttcgtttaattcaaaacgataaatccctttaccattctttttagtgtaagaaccaatatatccatttgtcattacttttacccctccatgttagtcttattttcattttattaaattttagctagaattaacaatcatttatcatttccttaaagctaaaactatttaactactttaaaagaactatttgctgtgatatgtcattattcgattttaattaatccctcttttttacttacacgagcattaattattaacgcgtttatgcttccacaaaatttttgttgcaaaatagaacacatgttcgtataatgtaattatcagattggggtgaattaaggatgacaagttatgaagaagaaactgattatcgtaacgttccaagagaattactagataacaatatacctatgggaagaggcatgattaaatgggctccttttgcaacattacccgaacaattcgaaacgattcaacaatacattatcgaccaaaacaaaattacacgtcctgtattatcagatgatcaattggctgagctaaacattcggctacacgaggcgctacaatatgcccaacctgtagaagttaaattttataataatggctttgtagattcagtacgcttaaccatttatcgtattgatgctattaattatgaaattgatggttatgtttacaatcagcaacaacgtcaaaaaatttctatctttgatatcttagatattgtcttgttaccttaatgctttgaacataattaaacagattgagtatatgcatataagatgatttttaacatcatttttggatgataggatgttgcgccacgatgatgtctgaattcatcgaattcgctatcaggtattgtttcaacaatttcattaacatatcgtgaaatatcattttgagggattctaacagaagtttctattggtagtgtagttggggcatgttataatttttatacataaggcacctcgttaatttagtttagtggtatttattaaattataagaagggacccaacacagaaaattcattttattgaattttacatttatgtgcaagttgggcaaagtgtcttattttttaaaagtatttcaaagtaaaattacatgttaatacgtagtattaatggcgagactcctgagggagcagtgccagtcgaagaccaaggctgagacggcaccctaggaaagcgaagccattcaatacgaagtattgtataaatagagaacagcagtaagatattttctaattgaaaattatcttactgctgttttttagggatttatgtcccagcctctaaatgttattagttatttttactttcaatatcagaaataatttctttagtttttctttcaatatcttcaaaatcttttttaaagatataagcaaatgctactacaccaacaccagcaactaatgttgtaatagcaactaagctaaatacgaatttaaacacacatttaataaaattccacatctcaatttcacctctgttaaattaaatacctatctacatttcattatactatcatatatagaataatcattaaataaatacccactttcacgaaatatattcatcaaattatatagtgagcaagctaatgattattttcaaaaatgccgaggaacctctgtttcaacgtgacatgaccttatatgctaatgttaacaatgactattatcgtgaatgctaacttaagattgatatttatgataagatgattttaagtttttaactcaatatccccaccatctataaaaatatgttttaactgattgataagtcttatacaccgagaaatcacctcaaacaattttatatttcatttagtaaaatataactttatttaacatgacattcaatatacatacgattactatttatttacaatatattacaactaaaaagaaaggggccgatgatatgcaacaagtgacatcagatatcatgacttttagaggttcacatttcgagttaggtgttaaaactggtaaatggcttcaacaaacacctcttctaaaaaatcgagaaaaagaatggaaaaaacgtgtcccacgtttcgatatagatgtaaatgaaacttatcaaatattccaaacatacgcacctcaaatatgggaagaattaatgggactacaaagtatactcaaaatgccaacacgccaaattattttaaactttggacattatcgttttaccgatttaaaagaaagtggttgcacggtctttcaaggcaaagacttcatggttagaaattatgattaccaccctgcaacttatgatggtcgctacttactttatcaacctacagatagcggtttagctcaaattggtcctgtatcaagggtaactggaagaatggatggtatgaatgagtcaggattaactatgggctataactttatgcaccggaagaaaccagcaaatggttttgtatgttatatgattggtcgtctaattcttgaaaattgccgaaatgtaacagaagcaatccaattattgaaagaaataccacacagaagctcatttagctacatactgatggacaaatcattgaaccatgcaattgttgaagtgacaccgagatcaatagatgttcgttatgataatatatgtacaaatcattttgaaatattaacacatgaaaatcgtaattatacaaaagaatctaaagaaagactggcgcgtaccatttcacaaactaatgataatttagatatgactacagcatttaagttattcaataatcctcagtatgaaatttacagtaaactattcaaaagctggtctggcaccatccatacatcaatgtatcaacctgaaacattaactgcatattttacattgggagaaaatgcgccaccagaaataatagatttcaaatcatggttagatggtcaagaccttaatatcactcactttactggcaatatagataccgacttaacttttgccaacaaataaataacaccgatattagagaaattatgcttcctaatatcggtgcttacatcctttatttattcaactttgatattaccatcaatcgtataaaattctaaaacattgtcgcttttcccaactttaccattagtaaatgttttatttttaactacgctatcacccgttcccggatttagctttagtatagtgtcttcaggtttactatcatacttaaaacgaatatctccttgtttagtagaagcttttgcatctacttttgatggcatgtttttaaattcaatgtcaccatgatcgtttaaaaatatggattgtttaatttgactcttgtcgatttgtagcgtaccaataacaactttaatattgctatttttaatgttacttttactaatataagtagaactattatttgtctttgaatctagtgcgtcaagatttgagtttttaataactacttcaccgttaatgctttgaatacttgtgttctctaaatcaacatcactgattctaacacttcctgctccagatgatagatttaaacgtttaatcattttatcaggcatttcaatcgttaacgttttcttattctcatgaaaaggattcatatcaattgcatatcctcttgtcttagaccttttatcactaatcttcaacgtcttatctactatattaattaatatatcattgtcaccatcatatttaactctaaattgattcccccgttttatacgaagttctgtactatccaaatttatagatacattgtcaaaagcatcgtctttgaatgttttatcatattgtttagtaccatatttgtttttatcatagctgaaccaaataatggttgctgctgtaaaaaagacaacaaacactaaaagcccaataaaaaagaatttcttcattttctaacgcttcctttgacagttttaatataccaaagtaaatattttaagattaaacgataaatgtattctaaaatcttaaatatgacaatgataaatactaatcctaatcctgaatatgatatggcaaaaaatacattactaattgagtccacaattcctctggatattgctgatgctaataaaataattggacaaaacagcagcaaaagtgatattaaaaataatgctaatacaaataatccaactatagatactggtataaggatgacaaaaatagatagaatgcctaaacttaatgaagcagcaacagctcttgaaatattttcaaatgttggtttagattcagcataatcaatgacacttctagcttttgtttcagctgcaacatcttgtgggtcttttaacttctttaaaatttccccttcatcaacgccattaagttcttgctcataaaaataacgttcatattcatacattttttgatctcttaaatgcctaggtagcgcatcaagtgctgtttctaattcatttaaataagtaatcttgttcatataggtcactcatcccaataaaattattcattcgttttttataactttaagacctaaagctatttactaaaaaattcaatacgtttaatttctaaatcttgataaagtaagtttaattttaaatggttatctctatcaatatactttaccgatgagaaatcattgccaacttttgttcttttatatccgaatccaagattttcaatcgcgttatttatcggcgaaccaattcccccatcaaaattagtatgtatcttttcatctcttactaatattatccccttaacgatgttatccttttctctcactttaacggtaagatcagggtgagctttactgttataaaatttaaaacgatcaaacttaatttttttatttacttcatagccttttttatcaaacttctcatttaatttaatatcgtttatttcaagattagacaaatccacagttttcgtatgacgatattgatataaaccaattaatacaccaaaagaacagattaaaaataatataaacacaacccagcgattttgaatacgcactgatgtcaccctttctttgtacttatttaaatatagcataaggtgcttcccgtttcatccttaacaaaaattaacaaagaatttgcaattaatttatttcattaccttttattactataaattggtataatgttgtaaatgctaaaggaggtttttacaatgacaaatttagaaacttatttcaaaaatagccaacccttaaatgaatacattgatggaatgaagacaaatcaagataccgttctcagtatctatcaatcatttgagttaccagaagatgattcacgcatcaaaaaaataaaagagatgaattattctaaagtattagtaattactgaagactggtgtggagatgcaatgatgaatctcccaattctaaaacacatcagtgaagcattaaatttagaagtacgcgtgttccatagagatgatgatacaaaactgatcgatcaatatttaacaaatggtaaatcacgtgcaattcctatcttcgtattcttgaatgatcaattcgaacaagaaacagtttggggaccaagagcaaatgaagtccaaaaatttgtaactgatgttcgtgctgataaattaccgagcaaagatcatccagactatgcagatttagaaaaagaaacacacttagttatatcaaaccgctataaaactgacgcttcattttggaaagcagtttataattccatcctaaataaattagaaaataaataaatttacaataagacaaactttgaggttgggaaaatttaaaattcccaacctcaaaattatttttattaaatgtcttttttagcgacatataagatattcaaaatgaagaatatcactatagaacctaatgaaattacccattgccaattgctaaaatcaaagttagagctaatcattttatcagttaagtaagcaaaagggatataatcaaaagcatctaaaactttttcaccgtatcttgggataaatgtaataaaaggtttaataaacggtacaatgagtactaaaaatacacctaatgaaaatatcattgctgttttttgtgatgcaagtgtgattaagaataaaaacaagccaaagaatagtaaaaagattaggaagaaccataaattatctacatatttagaaaacgccaaattttttccattactagatgcctgcacaacaatcaaaatcacataatgaattaatgcaaataatattgaaattaaaataattgaaattgttttcgaaataatgtatccaacgcgtgttttaactttactcatatatagttgaattgtaccttgtgaaaaatcacgcgtaattgtcttaacaacaaacattaatccaattattaacaataaccattttgctgcagcaaatacagatccatagacaataatatgtttcgggttatccatcgaatttgccataagtatactttgagttgcaatcaaactagatacgactagtatcgctaaatatgttaaaggacttttaaatatactataaaaatcatacttaactaaatttaaaattctcattatttatcacctctttgatttatattgaagtacgtatcacgcaatgaacttttacgtgtttcaatatatttcggataaatatctaattcagataatgcttttagtataacttgataatttttttgtgcattgatcattaaatgtccgtctgctttgtcgacattttgtaattggaaatgctctgcaagatatttttcagttctatcaaagtctttatgatcaacagtaactatcgttgtgtcagatgcaacaccttcctccatgtttacatcttgaacaaaatgtccgtctcttaaaaatacagctctatcacaaattaattcaatatcttctaacttatgacttgatattagaattctcatatcaagttcatttactaaagacttaattgtagtcagcacatcaattgagccatctggatccataccatttgtaggctcatccaagattaaaaatttaggtttattcattaaagatactgcaattgctaacttttgcttcatccccattgaatatttcttaactttctttttaatataaggtctcataccaaatgcatctataattttgtctgtgtatgctttatcaaaacccttacctaatacttgtgcaaataatttcaagttatacaatcctgatttattatcatataatttaggatgctcaattaaaaaaccgatattatctgcattatcaatatctacttttccatcaaatttaataatattaccattcattactttcataacggttgttttaccaacaccgttttttcctattaatccgacaattctactatcgccaaagtcaaaatcaatatcatttaaaacgacatttgagccgtatttttttgtaatatgttctaatttcatcgactgcctcctttaaattttctagtatttattttattgagctgtttaaaataattaacaataagtataacaatgcttataattagaaaaccaatatttaaaatatatgaatataaatctgggaatgatgattgacttagaacaaaataattcaccaatactattgcaattgaaaataaaaatggaactaaaatgataatagtaaacacgtatataccatatggcactttgactctacgcaattctgtaaattgactaaatgcaattggtatagacaagaagttagatatgacaaatgcatatgcagttgaaaaatagattgaatttggttcaatcacatctgcttcataagcatataaactaataacaagcgttccaattaatgttaaaacaatgcatgtaatatagttggcattaagcaattgtttttttgacactggtaaactcatataaaaataatatgaatcattaccacctaatctacgattgagtctaaataagtgaccagcatctaaaatccaaataatcaatattgttggacttataaaagattgcaataagtaaaagaactttgttgagtcaagcattatataaaaaggatataaggttaataatagaacatagatgataagtgtatatcgtcgtaatttaaaattcctaattaacaatgccttcatttaaaaaccttcttccatcaatttgatgttttcatgatatttaggttttctcttttcaagataaaccattaagttctcaatagaaggtgtagtgatattcactttatgacctaaaatttctttaaatacttgcgcatgttctgttaatcctataaatcccgtacgcttatgttcttcataaataagtagagatgctaattcatcatcaaggtcctcaatagcaccactcacaacttgatatctttgtaacagttgttcttttgaaccatttaagataacttcaccgtcacttaagtgaatgatataatcagctattttttctaaatctgagataatgtgtgtcgacatgaatattgttttattttcatcaattaattcttgctgaattatctccaatagctcatttctagctaagggatcaagacctgaagtaggctcatcaaaaatatacaattcagcatgatgtgaaaatgcaactgctagtgataatttcattttcatcccagtcgaaaatgtttttattgatttattgattggtaaatcgaacttttcaagataaaattcaaatacttgatggtcccatttacgataaaaaggggcaatcattttttcaagttgcttcgtagtccatctctcattaaaataattttcagagtaaacaaacccaattctattctttaactctatcggattgagagccatatcctcttctaatactctaataacaccagtttgtggttgatacaaatccataattaaccttattattgtggttttaccagcgccatttctaccaataaaaccagtgacgaatccttgaggaactttgaaagagatattctttaaattaaactgatcacttgaataattaacattacttaattctatggcattcatgatgattcctcctcataaatgaacgttaaaatatcctgcagttcctcaagtgacatttcgatggcttgcgcttcattaaccaattctttaaccaaattttcaatggtaaaaaattgtttctcttttaaaatagaactatcttgctccttaacaaaggtcccttttcctctaattgttgtaacaaaaccgtctttctctaaatcttcataagcacgtttggtagtaatcaaacttacttgaagatctttggcaagttctctcattgacggcaaatgctctccaggagcaacatgtccctttaaaatattttgttttacttgttgcttaatctgttcataaatcggaaaatcactattgttttttaaaattattttcatcaacgtccccctatcaacttctgtatatatacaatatacacaatatacacagttttgtaaatatgcatgtctcattatcaaccagtcttcagaaataacactgagtattgtattactagcagttgaataaaataaaatgaaatgacactaccatttaatcttgcattgtctacttcaataaaaaagactgctaaaacgaatgtctttaatctctacgtgacaaccgtagcgtcaacataaacaatcgttttaaacagtcaattctatttactatttttacgtcgatcattacttctacttataaaagcacaaatcataaacataatcgctgctaataataattttataccttggctttcatgattagttgcttgtaaataataaccaataataaataaaataattgcaagtactacaaatatttttgttagatgtttcaatttatttcacctcaacatcgacattataacaaatataaatttttttaataagttattgaatttcaaaagttcaaggtactaatcactttcaactaaaatagcgcaacaaaaccattcaatcaaaatgattattgattgcgatatattgtgttcaatgatattatttaagtgtatccacagaattatactacacaaccccaagtctggtaccagcagacttggggttatttatgtgtgtaggatcattttttatttttccatttcagttctaaccaaagtcgaaaaataattagtaagccacctgtaataagtgtcatcatcccttcttgccaccacatcattacactacacctccgttcgactaaagtatcatactgaaggatgacctacacctattctaacataaaaacagaacatatgttcgtattttggcagcagattttacatattattcgttaattcaccaacaacactttatctttggtataattgaagataatatataggcatacaatttttttaaagagaggttaagcaataatgaatcctttagcccaaagcttaaatgaacaacttcaacagtcaaatgcaactgcctttacaatgttatctgacttaggtcaaaatatgttttatccaaaaggcattttatctcaatctgctgaagcaaagagtacaacatataatgcaactataggtatggcgacaaacaaagacggaaaaatgtttgcatcatctttagatgcaatgtttaatgatttaactccagatgaaatattcccttatgcgccaccacaaggcatcgaagaattacgtgatttatggcaacaaaaaatgttgcgtgacaatccagagctatcaatcgacaacatgtcactaccaattgttacgaatgcattaacacatggtttatctttagttggcgatttatttgtaaatcaaggtgacactatcttgttaccagagcataattggggtaattacaaacttgttttcaatacgagaaatggtgcaaaccttcaaacatatcctatctttgataaagacgggcattatactactgattcacttgtagaagctttacaatcatacaataaagataaagtcattatgattttaaattatcctaataatccgacaggttacacacctacgcataaagaagtgactaccatcgtcgatgcaattaaagcattagctgataaaggtacaaaagttatagctgttgtggatgacgcatactatggtttattctatgaagatgtgtatactcaatcattatttactgcattatctaatttaaattcaaatgcaatattacctgttcgtttagatggtgcaacaaaagaatttttcgcatggggattccgtgttgggtttatgacatttggaacgtctgatcaaacaactaaagaagtattagaagccaaagtaaaaggtcttatacgaagtaacatttctagtggacctcttccaacacaaagcgctgttaagcatgtattaaaaaataataaacaattcgataaagaaatcgaacaaaatattcaaacattaaaagaacgctatgaagtcactaaggaagttgtctatgctgatcaatatcattcacattggcaagcctatgactttaactctggatactttatggcaataaaagttcatgatgttgaccctgaagaacttcgtaaacatttaattgaaaaatattcaattggtgttattgcacttaatgcaacagatattcgtattgcgtttagctgtgtagaaaaagaagatatcccacatgtatttgattcaattgctaaagcgattgatgacttaagataattaatttcaaccaataatctgatgagtatgactcggattattggttttttatttttaaaattattccttctttcaaagtatcataagatatattttattcagcaacttgtcaaacactatacctaattagttttatacatctctcctaacaaaatcaaaaaatcggacagatgaaaagtaaaaaactttttctatcagtccgatttattatagaaccaatttatataacttttggcaaatcacttcaaacattcaagcatcacatctctacaaatgtaaaaggcaccccacgattgtgagatgccttattataaaattaaagattagaatttaagttcaatatctacctttttaatgtcagttgctttaaatactctttcatctttatactcagtttttaagtctacatattttgacgaaccatttttaaaatacactttatacactgcgcgttcagcaagtcctatgtcatgtttagttatcccttgatcatttgccattgctgatttaagttttatacttaaatcattaattgtaattttgcttgcattatagaacacaaattcatttgaaactatgttttcaaatttatttattgttactgggaatttcacattattagatttatttatttttttttgatttagtgtattgttttacatcaatatcaatctttttaatatctttggcactaaataaattaggtgtaaagatgtctgattttaaattcactacttgtttctttccatttttgaaatatactgtatattttgcttgtttcgcaaattttaagtcaagatcactgatgcctctttcactttttaatacagatttcactttgtcatttaaatatttgtaactaattaattgtttattcgaaattttaagctttgataaaattggtgttgatgtgccatttactgcaattgtatatggtacatagctatccgctttcgctttagttcctgttttaacatcaatatctatctttttaatatcttgaacataaagcagattcagttggctaatatttgaatttatgttaatcacttttttcgttccatttttaaaatgtactgtgtaagttgctttttttgcatattttaattcacgttccccgatacctctatcatgcttcaatactgatttaacttttttagagatatctttgtagcctacacgtgggtcacctgtaaattttaaatctgataaaattggtgttgatgtgccatttactgcaattgtgtatggtacatatctgtctgctttcgctttagttcctgttttaacagtaatttcaattctcttaacatctttcgcatgaactaagtttgctgtgtaattttttgaattcaactgtaagattcttttaccaccatttttaaaataaacagtataataagctttcttagcatattttaaatcttgttcactaatacctctatcatgcttcagtactgattttatttgactagttaaatttttgtaatttgtccaaggtttatttgaaaatgaaagattcgataaaatgtttgtagatgtaccatttaaattaattgaatatggaacttgatagtttcttttagctttattttcgatatgtttttttgtatctacgttaatattgatacttttaatatcacttgaatttattaaattcgctgtgtaaatacctgatttcaaatcgataactttcttcgttccatttttaaaattaactgtatatttcgcttgcttcgataatcttaaatcaacatcggtaatacctctatttgattctaaaactgatttaactttatcctctaaatctttgtaactaatattttgattcttattaaatgttaagtttgataaaatattttggcttgtaccgttcacagtgattgtgtatggaacttggtaatttgctttatctttctttttatcttcaacttgctttttagtatctacgttaatattaatagctttaatttcacttgtattaattaaatcagctgtgtaaatacctgctttcaaatcgataactttctttgttccatttttaaagtaaacagtatatttcgcttgcttcgatagtcttaaatctatatcactaatacctctgtctgattttaaaactgatttaactctatcctctaaatctttataactaatattttgattcttattaaatgttaagcttgataaaatattttggcttgtaccgttcacagtgattgcatatggaacatggactttagaatatccatggtgtaacgaacttgatgatttatctaatggcttagctgcggcagacgcttcattattattaaagtttgcacctgttgatgctaaaacacctaatgctaaagttgttgtaatcaatgacttaaatttcataaattatctctccttttttgtgtaattcgtatttgcaacttaattatagccagactttctctattttttgaattaactgaatattaataataaattatctttaacaataattttttaacactgttaaaagttcttttaattttgattaactaattaatttacaatacctaaaatgttgtttggttttgtttataccaagcttcaaacttaaatgtcataacaacattcatttcttaattccgattagatttgtcgattatatttacagcatctttatactcaaaaaacatttacttaaaaatataaattcgatttaataattaatttaaatttagttaatcaattttgcatctattttgttgtaagctatataaaaggagtgataatgatggtgaaaaaaacaaaatccaattcactaaaaaaagttgcaacacttgcattagcaaatttattattagttggtgcacttactgacaatagtgccaaagccgaatctaagaaagatgatactgatttgaagttagttagtcataacgtttatatgttatcgaccgttttgtatccaaactggagacttttaacataaaattacttatcattcaaaaagtaaaacagcataatatcaaggtttataactttatcattatcaataatacctcatataaaataaaattttagggactttttagggactttaaatttaaaattacaagtttaatagaaacatcaaaataatcacatgtttgtgtggaatgtacaccccaaaagctagactgaaaaatctattttttgaggtgtatttttataggtaaatataataaattagagtagacaactcagaattccaattttataataatattgcttgacatatcaaactagatagtactattttgaatatattattataatcaaaaattcattgtaaacttttagacaaaaggaagtaataaaaacgtgaaatttaaaacaactaaagaatgtaaaagtaataatatctttaaaagaagtcaagaaattaataatagagaaagtgaaaagggttgtttatggggcattagcatgttgattctacttttcttattgattctgtttggaataactgcttgttcatcaagcattcactttattaattagatttttttacttggaggtatcatgtgaagaaccatacaaatataattaatatcttattagttatagtcaactcattaactcattttctaactctaaacacctcattttttaataattcagcatcggatttctgttttatcataggggctatatttttcttaatcggaatttttgttgcaatatacggtatgaagcgagcaacatattggttaaacttattgattttatttaccaatattttttattttctacacttctgtgtgttacttttgttaaaatatataggatttaaattatttatttatgaagggtgtgtattgttatttatctaatttatagtctaattgtctatttcatctgcattataaattttttcataatggctgcaccattcttaatgactaatgctgattatgtatggacgcctatgactacagttacgttatttattttgagtttgattattttcttgatatttataaaaacaaaagatgtcgttcatttaacaattttcatattaaacttacttttttcaatactttattgtttgcctatactgttttatttatgaacacttttatattatctagaaaattaaaaccacccgtaaaagggtggtttttttaatatttactttttagtgcttcgtcaatttcgttataaatcttttgaagttgatattttgcttctgacattttcttaaagtcttttgacttaagagcatacattgctttttgacctgaaatttttatagttcgcttataataagtgtttaaacttccagtagctaattcattaacatttagttcatctaataacgattttaattcattagctaacttttcgttttgatattcattcgatgttggcaagcttgtgctagcttgtgcctcatttttatctagattagttactagtggtgatgctaaaacgattgctaaagttcccgcaagtatagattttctaattttcattttttattctccttagtaattagtactaatttattttaatgactgactaaaaaaaagtacattaattattcattaactatatagatcttcttattaaatgaaaattaataaattatcaaattgacataccttattgtatttatagaaaaacaaaaaaaggtaagcaccgaaatgcttacctacttcccataaacaatataacacatatacattgatttggaaagcgcaaaaataaatttaatatactagcccgaaggggagcaatacataaaaaatgaaaggcgctccttgaaaacgcccaaggtaatattaacataaaatggctactattgcattatctaattttatttaattaaaacaaatatatatagcacaaaaaaactagcccgaaggctagcttatgaatagatgaaaatttgaacacattgctgtgtctaagataaatatagcacatattaattactattaatagaaaaattatagcgttttttagattatttcaatttatcgagaccaaattcatcaaaacactaattgaattttaatttttagttaaaaataattaatcttttattaatttcaagttaattaatatatttcgtcgattagattaaactcattttaggaatttcgcaaaactaactataaatttaaatatagaatttaaggagaattaacatcattatgaaaaagaaattagcaacaacagttttagcattaagttttttaacggcaggaatcagtacacaccatcattcagcgaaagcttttacttttgaaccgtttcctacaaatgaagaaatagaatcaaataagaaaatgttagagaaagaaaaagcttataaagaatcatttaaaaatagtggtcttcctacaacgctaggaaaattagatgaacgtttgagaaattatttaaagaaaggcacaaaaaattctgctcaatttgaaaaaatggttattttaactgaaaataaaggttactatacagtatatctgaatacaccacttgctgaagatagaaaaaatgttgagttactaggtaaaatgtataaaacatacttctttaaaaaaggagagtctaaatcatcttatgtaattaatggtcctggaaaaactaatgaatatgcatactaatagtagttacataaattaaaaggtagatatttcttttttatataaaggtttggcagacatttcataacttgccaaacctttatatatctaattatcaaactgcactaaacttaccaaaactgcttattctattacctgccttgtctacctctcctgtcgctatataacgacgttgtccactattagcaatataagtaatccatctatagccattaatgcaatatgcgccgtcatatttgatagttgcgttattgggtaatacacctgtaattcttgaattagttgaatagccatccctcacgttattacctttaacattggcaactgtgtaataaccagtctcttttttatacggtacattgtttttatcgagtgtataacctgctggcactggtgaattcttttcatttttagctggtgttttaacattactgatacctgatacacacttccaataaaaataaccacaccatttaagatgcggtgtagcgactgtaatatttctatgttgttgagatatatgtatcgagtgaagggcaaaaaggatatcaattgcaggataagtgttaggttactaggccacttaacaggctatatagttcactcctactatatacagttaattataacataaaaagcaccccgtaaactattatacgggaatgctaaagtcatatatactacgagggagtagtatgaaaactatgctctctatcataagaaaaaacacccagtgacatgcttgggtgaacaaggatagatgtaaatagttgatgcatgtgtaacacatcataacaaaaaactagcccgaaagctagctataacatacaatctaaaaagacgtcccttgaatacgtctagaaagattataacataaaaaaataggcaagtaccgaagtacctgcctaaaaaaggattatccactttttcatcctaactgatttctccccataagtcacctaatatctgattaggtggggaagaaccattcgtgcatgaatgagaatttgatgaaagataattttcactacacatattcaatcaagacattgctttctataataaacaactattttgttttatttcttttctataataacctttgtaattaagttgaatccagggtttttaatatgctctgataaatctgggacaacaaaacctttttctgttatagggaaagacttcgtttcttcttttttcttattcttatcataataagtgacttcgatctttgcgcttggatctaattcaactactctaaactctttatatgctgtcgcatctaatgcccattcgacatagtattcaattttttcttttgtaagtgtagtcccaggtttaataggaaactcgacataatgaggggatagcaattcatttcctttaccatcaactccagtcacatttaccatcaaatacgggcctgttggttcaaaataactcgcgtcatcgccttttttatattttcctttgtcgaatgaacttgatgcacttacctcattagtaattgaagaaaatgagaataataacaataaaacagttaaaaataataaacctcttttgagcatggcgcttcctccaaatataatatatttgtttttatttatctctttttatagctaacacccttatttaagatgataaatatcaacaacttcattttatattgagaaaatattaaaaatcaataaaatattaaaagaaactaaaattacattaaaaaataattaacaaatatttaacattttaacctaagaattaaaacacttctttcacaatcaatctctcatgccatatccactcattatgattgttccaataaatgcgacaccaaccatctataatttcaaacacatatattaatgttccaggcgcgtatacagcctgtccaacatcgaatctatagttagtacgattatcaccgtatctagtggctgaagtagcacctaagccgtcgattttcgcattaaaataagcaccttttgaccatttaaggttataaggcgctttacttccaactgttattttacttgcagatttaccgactgctttttgagcaggtggtttaactttatttgtgatcttattcattaagccctcacttttatacttaggtctaataaagtgagtacagccgtaataattatcccaacgtaactttgcaggcgtatttgcgttaccgtcatagttctgttccaaaattaaaaattggtttgtattaccaccattaaacactaaaccaatatgaccgtattgtttatatattcctttggtaaatacagccacatcacctatttgtggaacaaacgatggtgtgttttcatatactgttgccatgtttttaaaatcgttattgattgcatcttttgcatttccccacattctaatttctaacaaccaataaatgtaatcaactgctaaatctgcacattggtaaccataccaaccgtcaaaatcaatatatctaccttgataccaacgtaaccttgctcttgcttcactgtatgttttcattattttacctcctagtattttcttcttggttcttcatattctaaagcttggtggctatcacctatacctttagtagtcgggtcttgaatcacaccagttaatactaaaaatcctaatatagcgtttaaaccgtctgttaattgctctgtataaacttggatatcatacccaatagcttttgcgatgttttgagcaaataaaaagatagctgacaatatcgctacccaaaatgatttttgtttcattctaattttccaattaatcatattcttatctccttttacccaaaataaaaagacgactaataagccgtctatttgatatttatattatggtgtgttaatttatatatagaaaaagggcaacatgcgcaaacatgttaccctaatgagcccgttaaaaagacggtggctattttagattaaagattaaattaataaccatttaaccatcgaaaccagccaaagttagcgatggttattttttattgcttaattcaataagcttgattactagacctatcaatgcaataaggaataaaccaaactgcaacatggtactaattgtaatcattaggcgtctcctttctaaagatttcagtaatgccaccataggcaccacctccttatactcagatagccaccatctatccaacttgctcacttctgcatattaccataattacaacaataaataaaaagtcagtaccgaagcactgactaaaacttatttacatttaccgaaccaaaaacatgtccagaaactataaccaaagattagtttaaacattttattcacctctcttatatgcccataagcatacgcaataatgctataattagcgatccaaatattgtcccaactaaaccaagcacccacattttcatatcacgtatgttcttatcattttctttcttattcttttcatctatttctctttctttttgaatagcatctaaggttttatctaatttaatgttaacttgctcttgggttttttgacctaatttaatttcattgagtgtgctgagcattgttttatcattctcttctaaccttctgatgcgccattcatgttcgtgttttttgaaccaccccaattcagtacacccgctttctaaaagaataaagattatgagtatctaactcatagcttttcatactgtttcagtgttaactgttacctctggagataaatctgatctttcaactacttctttaactactttcacacgttgttttttgttagttaattgatataacaaatttaacgtctccgcaattttcttagcgttttcttcagatttaaaatcttgagcatggttaaccatttcagaagttgtaaaacttcctgtgaaatcttgatatactacacgttctgtaccttctttgtcgatttgtactaaaataaacctttctgtattgttgataatttcttttgccataattaaatgacctccttaaatttttgtataaaaatagtgctaaagattactcttcctcagcacattgttgattttctttattttcttgtatatacgcttttaacatcgcgttttcttgtgttaacctcataatttcctgtgataaataatgaattgtatattcaggattagcttgtaatccttgtttgttatcctgcattctttgactcctccaatttcttgattcttagttgttgttctttgataacagggataagatgaatccatagacgatcatacgctataccttcaatttctcctttgtcatcatacgtgacaaactcttttaatcctaaattctccacctcttcagcaatcaaacctacgtatctatcaagtttataggtgtcttccgataattttctatcttctctcagctctctagctaaaatttcagactcagctttatcaaaccacgttctaataggtaagttaagaatagcttttgaatgttccagttgttcatctctatcgttatattgattttcgatagataacttgtatttacgcgctgatgtcgaacgcccaattgtgccagcagaagtaatatgcaaattagctgcggccgaataagtacgtctataaattgagttagaagctatcctatctcctgcatcatctgaacctacagacagtaggtctgtactctgtatatgaatatacctattaccatcacgtcgtttcagcatattaaatttgccataccctgcttcgattgttgtatctccacctgttgcatatcgtccattaacaatttgaacaagacctttatttctttctttagaaaacctgatacccgcaccgtaatcatagttctcatcagaaccaaacataatataaccgtcactcgaataagcattatctgcattagacagcgtgaatgcaaatcggtttaatccaggcactttgtctgtgtttggatataaatacaccggtgcctgtttgcttttgatattcgatgaagcgtaagactccagaacaacccgattattatctgacgttagtgcaacgacaccaccataggaattgattgttatgccattcataccgctatcactgtaagttttatcccaccattgaatagtaccggatgaacctccgtcttcgccttctccatcaatatatgttgaaataccaaaatgtgacatataaagtgaaccgcctgcggtattatttctaaaccttagatgtccatctttaagacgtgtgaatatatcatcggttgatcgtttgcctttccaagttcgttgcacaataccacctagttcaatagaatcattctgtatttgaacatatctgttattgttaccgcctttaattccaattctattaacattgatatcaagaccctctcttgataaattaaggctgttgacaatatcggttttatctactttatctcgcatattttggataagaaggtttatttctctattaccgttaatatcaattttatcagcatttaatctaataccacgtggccccacatttaaagcttgagccactccgttatcatcatatctgattgttgttccatctgtaacgttttggacaatctcgtttaatatatttgaaagtgtacgattggttgcattaaactcttctttagtagttcttaatttgatttccttaccattttgtataatttgagaaccatagcgagtcagtgttctcctctgtgcatctgtgctttctttgaccttgttgtctgtataagcattagctttcttttcagcgtttctagcctttagttctgcgttttgttttgcctcttcaagtttagcttgagcatcttgtatagcgcgttgctcttcttccgaaattttaccatcagcatacgcttgcgattccttctctttaagattatcttgagcatcaatgtatgattttaaagcttcttgcgcttcttgatttgcttgttcaatacttgctttaatctcaggattattggacaaatcacttaactggtcatcagtatattgtttttgttcttccaatccgtttcgatattcgtttaacgtaactttatctttgatttcaccttttaaagtcgttctctcagcttcagcagtatctaaacgttcaacaataccgtctttgtctgttttatagtccgatgtttttacatagtcacgtaattgttcttttgtggattctctagctgcttcaatagctgatttaacaacattaggttctccgactaactgcaaatcttcattcaccgttaaaccaaattttgttgctattatttccaacgcttctttatatttttcatcagtgtattgtgactgtaataatttaaatctatctgaaatggcgattttgacatcttctacatctgtataaacatcttgtaatttctttctatactcaagaaataaagtttttgtatctaccaaccgaccaatcgttgcagtttcgggtgtcatagattctaaattatttttaatttgattataaacatcaatcacagcgtctaaacttgcttgtaagtccgctttcaaatcattatctactaagtactcgctattcagtaattctgtagcttctgacaaaagactagcgtgttgtatagataaattaataaaaatattgtttaattcactgaatagcgctttctctcttgttataccacctaatttttcaacatcatttggtgttgcttcaatccatcgaccattccaatatctacgcaagacagcaacatcagggttacttgtatcataccaaagcgtatcattgactggattttctggcggtgtatcacttttatgaattttgcgttcaaagtattctaattcaccatctacaacatcttttactatagtattgatattgctaatattgtcgtttaatttttggtgtattaggtttaatcgcttgttaaactcttctcgtaattctgattctttgaactctttaggttgaccgaatgtatatgtgctattttctgaaattatgttatattcttcagcaataacttctgcctctacatacaatggcgggttaaaatctctatgttttactctgactgtatcgccaattgatataatctcgtgcggatacgtaacttccaaatcagtagaagtaatctcatatgacataactgccgacttacgtttatttaactctgttttggctaaagaacttaatcgtgtttcattcatattttgatcatctgattgtggttcatatatcccccaaatatagcgcataggtaggttgaattgactttgcgcttcgtcatctgtcacaactagctctaaacgctttcctttgtcattttcgggtcccacagcaattaatgctgttttgatttctgacatatcaatcttcctagttaacccaaccaaatctttaccatactcaatttctttacctttgaataagctgtttttctttttgagtaccacatatctacctttgacggtattagaactaagctctatataaaaatccaataccattttataggttgtacataattgctttaaaacttcatatctagtttgataagaagtccatgacgtagtacgtaagccatcgtattcggtttgttcagaaacttcccaacctgtatcgctcaacacatctttcaatgcttctgaagttgtctttttctcaaatttgcctggtgcatacggtttagctgttgttatatcagcaagataagacgctatacattctatctctgtgtagccgtccatcgtatcttgaacccagttaataataaattcacgccattgtttgtttgaatcccttataataacacgatgtcgttcacggaacttttcagctctttctgatgatatgagcagttcaagcatttctgaattgtcattaacattacgtttatgaatcgctctaactaaggaagggtcatcagtagaaaggaaatctataatcttgtcgttaaaatctaaaacatgtatcacactctcatctcctttctataaatatctatcttgccatttaaccgtcgtatcaaagacgttttcaggttgtatgattaattcactgtacccagaatcaacattgaaataattacttccaaacgatttctcgctcaacattggttcctcattgatgacaacactttttgcttgcatatctatttttactaaatcacctttttgtataatgacatcccttgcgcctttcggttttggtagaatctccgtattgaatgaacctaatccattcatctccatccacttataaccattatacttcgcactatagatagctatgatagaagctggacgctgataaaacttaccgccatctatccactctttctcatccatatcaataggtttacgtctatctgggtctttaatgtgatcaaatttccaagttttaatagaaaatttattacctactcttctgagccgcatataaacaacgattctgtccaagttatacattatcggtttattctgatagtcgtatatctttttggggtctcctttttggttatacaacgtaacaacaatatgtcctatttttctatcatgatatttattttcataaccaatagaagcaagtaacttaccatcactatcataaatatgttgtgctgttcttccggcacctttacctttttgttcaacaatacatttataggtaatttgaaaatctgtcatcgctttagggagccctcgtttcgtgccagcaccaacccaaccttttgcatcagaaaaattagttgctttatatccttcgccaagattggatatcacaaagtcaccgccgactttaccacctaaatcattacttggaatatcttcagtaatcatcttagtccaacctttgaaatcacgaaactcactatgataaacaggaggcatgtaatccttaacttctttggttacctcatcatcaccaaccataaaataatcttcatcatttttagtgatcataaagtaactagatggtttaattgctcgggcttcaacaattaaaggagtgtcagcagtcccactatttacaactgaaacttggtctgaaatcgcagtatttttatatcctgttactgaatatttgtaagggtctgttagtactactttgatagtgaacttaacaggtattgcaaattctttgtgcagctttattggtccttcaaaataagcgttccagtaccaatctttagatttgaattgtaatttaacttgttcctcgtagttaaaaaactttactaattcattcaagacgtcatcatgtgttttaaagccgttgtgagataaatagtcattacgtaccaccaaaggtatatcaaaactataagattcaagcctacgccctttatatatagaccccgaacgtccatctacattttcagtttttaaaacataattaaaagagggtatttcaaaccctctttcgacatacaaccaaggaattgttttgttgttcactttaatagtgtctatcattgaatagcaattcctccttttctaaactttacttttgttgattcttgcctttctcgcttttctatagacgcgttcacctttttatcaaaagcgtattcgtcaataatcggctgataatctttatctgcaatcacatcgttggattgcgctattttcagtaataaagctatttgttgttgctgttgttcaatcattttcaataataagcttgggtcatcaaacccatttacactagacaattgactaggacgcttatttttactcgcttttctccctcttacttctgctgctgcataatgcaacatcttcattgcatcatttctacgagctggatctgttggaataatccattctggatgaccgtcttcacctaagttataccaaccatcaaaaacttttccacctgtagcatatgcgtaatcaccagcacgcttaaatccatcccaaccgtagcgtctaacaatgtactgcattgctgaaataccttgatgaaccggattattaaagttagtatatccacgtttagcgtttgctctaaaagttgagccgatgatttggaataatcctcttgatgggtctcctctttgagcattaatatcccaattattcactgcatttgattgatagttactttcacgctttgcaactcgcatcatctggtcatgaatccacttacctttataacgtcctcctaaaatactttgcgcttgacggattactcggcttgcataagttgcaccacttccagaagtagcaccaccgccaccaattgataacctaccttttttctttgcatttcttaaatatggttcagggtcaaagtgacgtccatttcttctcatttcaaaatgtaagtgtggtcctgtactaaatccggtattaccagttaaaccaacaacatcgccgggctttaccatcgtgccactaggtggtgatttgctaaagtttttcaaatgcgcaaatagcatatcgataactccactagtaatttttacataattaccataaccaccagacataaatggcattcttgtaagtctgccacccatcggcgttctaacttcttgatatacaaatggaaaatcgacaccttcatgaaatggtcttccagttgcagcagtataagctgcggtacgtccataatgataattaattttgtcagggtctaatattccgccgactaaatcgccaccgcccatagcttctaaattttcttttatccaatcagtagcacttttcttaatcttagaccatgcagcttttgttatgtcgcctgcaattcccatacctttagttaaagaattgaaatcaattccaaaagcttcaagtatataatttaaaagtttgccaggattttccataaaatctaaaacatcgccaactttatcgccaagccatttggtacctttacctatttgatcttttgtccagttaaatgccgatgatgcaccggatttaatatctttccacatagtacctaagctaaatcttggaagcgttccgtttaacattgaataagtttgtgtaccgttgtatacttttgagcctttaggtaaataagcggtagtatctgtattaggtgtgattacacgtttaccattagggaattcaattatttcatttctgaaaccattcggaccatttccacgtcctttatccccaaccgtagcgaacgtatcccgcgcaatcttaccgttcttaactaatcttgtagtagtatgtgtgtgttctgtaccagtgtgtaacttaggtattttatccattcccagcttaccaccgacccagtttaaaccttcaattaatttattaagtccttttttaatagcatctaccataccgccgatatgacttttaattttgctgataatactttgtaagccgtcacgcatatttgtaaaaattccacgcactttactccataaacgacttgcaattccaaccgtattatctttaatggaattccaaatatttgccatccaatttcttagattactaaaaatatcttttgtcgcattccacaaactagtgaattttgatttcacaccactaaataatgactgtgcttttcctatcgtattcgtacggatactactccatgtgttagataaccaatttttcatattcgtgaaaattgatttgacactattaaataagaatccaaaaatactttttgtcgcattccaaattgctgataaagatttactgaatatactttttattacgtcccaaatacctgttattaatccttttagcaatccgccaaagtacctaacaacgccaagtattttgcctacaaaccataattgaattaaattccatattaattgaacgactcctttaagaatcataataatcgcgtcccaaactcctcgccaatctccagtaaataaacttgagaagaacttaattaaacctagtatgatatttaaagttccttgtatcacaccttttatattctcccaagtactgacaatcaaggctttaaccgccggccaaataaattgcatcacttgccagattgcaaacattattggtttaattacaaaatttaagataaattcaaatataactttgataaaattgcatatattttgaagcgcttgaacaatagaaattccgttttcattaaagaatccattaatttgactccaaatatctttagcgaaatcaacgattgctgaaaccgcttgtttaaagacgtttttaacggaatcaatgaaaggttgaataaattgaataaaattactaaatgtttgtttaacactttcaattgcatcattaacaaaatttctaaatgtttcagatttcttataagcaattgtaaatgcgactgctaggccagctaaaacacctaatacaatgccaattggaccagttaaagctgtgaagacagttcctaatataggtactttagtcgataaaaaactaattaatccatcagcctttgcaataccagctaatagtggggctaatacagttactgcattaccaattgtgcttataaatgcacctaacccaaaaactacaggaccaattgcagcagcaataccaccgaaaataacaattgatcttttagaaccatcacttaaattcgaaaaccaatcgacagcgactgatagcttttttattaattcttccatgactggagcaaacgcactttcaatagaagcccatacatcagcacctactaattttaatttattcattgctactttaaatctttcggagccactttcagaatctttaaatgtttggtttactgtgccttgggaatcttcaatagtttttaaaaattcttgataactaaagcgaccacctttaatagcgtctgctaaatcaggacctgcctttgcaccaaatgcttcaatcgctaaactagttgcgctagctatatccggcgtcttttcaatttctgctaatgtcttcttaaattcttctcttgggtttttaccagctttaccccaatttgatatagcttttttcaaaccactgaatgctatttcagtattaacgcctgacttttcccattgagagaataaagcaattgattctttcatctcaaagcccatagctctcattggagcgccgtatttagtaatactatcagctaatgtgtcaacacttatcccactagcttgcgccgcttttgctaccatatccaaaacactttgatattcacttgcttcgatacctgcatcgcccattgcacgggtaattaactgtacggcttgcacaccgtcagaacctgttatatgactgaatttcaagaatgactctgtggcattttcaagttctttacctgtaaaacctaatcttgtattaacttctcctaaaactccaccaacagtttcagcatctgctggaaaattgccataaacatctttaaatgagttctgcaatttttttaattcactgcctgttgcgcctgttgcttgagtaacagtatctaaacctttatcaacttctgcaaaagcttttcctgatgctgctgcgatacctaaaacaggtgcagttacaccaatcatcatgcctttaccaatggattttaaaccatcacccatttttgttaatttaggtcccatactttcaaaaactttactggtttttccccagccactttctgccattctttgagcttcaacttgagcttttttgaactcttcaaattcggctgatgttttttgtaattctctttctaaataattcagttcatttgcttgtttgttatattcttgtcgtaacttttgagctcctgcactgttttcgccctgttcttgagataccttgtcatattgcttagctaaatcatcaacgtttttcttataacctgtgatagttccatcaagttctttaatcctttgtttgtaactatcagttgatttttcggtatatttgaagttgttgcctgttaattttaagtcagaatttaaagttttaaagtttcgtttgatttctgcaaatgatctatttaaatttgctgcatctaaatccaaacctatagataaaccttttattctttctcccattttttacctcctttctaaaaaagttcaaaaaaataaccctaaccaaacggttaaggttaaaatgcatcaattaaagcctctgctttttcttcagaaatgtcattgtttttattttgatatatggaaagcacataatgaaatggcatttttaaaacttcgttagcgtctttaccattttcaattaagtccatcatgagagtatccatatttttcaacattgctttatatgttaaatcttcaggctttatttcatgttctggataaaatttctagtttcctcagtttgttgaccttgcgtaatgaaaaccacttgttcacgaagtgcattcattccatcaggtgcatgcatacgttcttttaggtctttaactgcgaattggttatcgtaaatttttacaaccatatccatcaatctgtcagcgatttctcttggcttcatcgtgctattttcgtcctcaatatcatcgattaaatccattgcttcgtatacaatttcaaatgaaatgaagtgtggtgttaagtacgtttgtaatttaatttcatttgcttttggatcttctactaattgaataatgttacgttttaattttgccattttataatactctccttattttcaaataaaatagaggggttgtcccctcttatgcttctacatttattgttatagtgtcactcatattaccaacatatgctttaaccgtggcaataccttgtgcttccgcagtgacttgaccatcactattgattgatacaatattcgtttgatctgttgtgtatttcaataacttactttgattagatggctctactacaacatttaaatcatatgtgttgccaacttttagtgttttaaaactatctggtatattaaccgactttatctcagtttccgatgaagccggttgcgttacaaagtttcgccgttatcctctgtcacgtttccagtatattcttcgcctaaaattttctttaagaaagcctcttcgcctttttcaccatttccactatgatttgtcatgtttgctgaatcaaagatatatttacgtactgactttttattatcaattaaagggaaaagtgcctcaccttcaacctcttcgcttgagaaatcccaatctttctcagccgtttcgccatcgattttaggatttgtaaacatgactttaggtaataaaaccgttctaaatgtgccgtctcgacgctcttgtctgaaccaaattgctacatagttgttttgtttaccttgagtttctttataaacaccgtattcatcatactcttcattgaatactattttgcgaatctctttagggaaagcatgcatttgtaacgaaattttaccttctccgtctgtgttccctgattcgattggaccaccatcagcatatgctgttttcaagtctcctccagtttcaacaccgattttttgtaatcctctagtttttgtaatatcgctatattctagctttgcgccttcttttgttaatttagcgaaacctaaaccagtaatgttaaaatacgctttcggcgcacttgcttgttttactaccatttattattcctcctcgtaaaaaatgccctcgtagacacgagtgcttctatatgttttaaattcttctatatattcaggttttccgttggatacatttcccattttcagttcagaccataataacttttgaatacgattagatatcttatttcttatgattctcgcgttatacttttcgttaaacttcacaaatacatctatttgtacaatgtaactatatgcgcgctcatctccgtcagtataagttgtaggtattgggtcgtctatatcgtcaataactatgaaaggtacatccgtatcttttacgtttgggtatttattgaacttaatattattgatatttacgtgctctctaataattctgtcttgactaatcacttcatgaactttgtacaaaatatcaatcacaatttttttaactccctttttagcgtctcaaaatacttattttgcccttgtcttattgctctattaacgccacccatagctttaggtttgataaatttacctgtccctttttgaacgtgtccattttcaattaaatgtacgattttataacggtctttagaacctcgccaatgaacagtaattgtacgttttccgtttatccattcaggtttactaaaacttacctcattaattaatgcgcccgtatcttttgatggctttagttgtttttttacttcttcaacaattactttagcaccagcaattagcgccctatcttgaacttttaacatcgcttgagttccgaaacgattttctaattctctttctaatgctttatcacctatcactttcacactcatgaactatatcctccacgaatcataataaagtctttattatccaaatctggtgatacttgctttatattcaaacgatttttgaaatatcttgattcaatttcaagataatgttcttcactgggtaaataatcaccttgcggatcacgaatatacaatttaatgtcattttgggttccgtttgagatagcttgttctaattcacgtaaccagacaccatcaatactcgcccaacagctatataataatttttcttctttttctccagcttctggaccattattttcagtatacttataaaaatgaacacgagtatttaaacgtttagttgtaattctaggttttttaaacactttcttcatcttctgatacctccattagagataacgaaaaatctattatttcaggtctgtaattatcgttgaagtgttctaataaatcttgataagcatatctagcgcgtataagtatcaattcttgacctattaaattctctaattcaaaaactccgcactgattttttatacgctcgtacgacatttttaacaactgctttaagtactcatcctctgaattatggtcaatcttttcaagtgatttaaatttgacaagcaaatcatcaatcgtcattgtcttcaccattcaataagtcgacgatttcacttttaaccattgaactagacgcttttttttgtaatgattcgcatagttctaataattcttgttttgtcagcttatctaaaggtacgatataaactttgtcgtacttatttttgatttgatttgtcaacaattcaacacgaggattgttatacccttcagctggatacaactcccctactttgtacttgtgttgattgtgctctatgtctttaaaagctctaacaactttaaatttcaccattttatcacctcataaaattttatagtgtttcttcggtaccttctaaagctggcttatgtccttttaaatctaatttccaaacagcagcaactttattatctttcgctttgccgtaagcaaattgttttgcagtgtataaatccatatcatctaacgcaagtgtttctttaaatttctgaacattaataccaccagctaaataaccatcatataaacctttaacgtacgttaaaaccttacctgcttcttggactgtagactcgataacattcaaattaaatggtaaagcagtaacatatacgccatttgcatttaaatgtgtatactgtgcttgaacctcaaaagcatcggacggattaacaaccattgttacattacctttaaccgctactgatttacctttctcgttagttgagtggtatttaaacacttgcgtcaattcattaactgtagcgcgcggattagcaaatgtaagcgtaccttgttcttctttctctggataagcaccctcagttaccgatacacctttttgtacttgacggtttaagccgattggttggtctttaccagtaccttttaagaacgcagtttcaagcgccactgcaaatgcttcttcgatttgaacacgaacaaatctttcaatccacgcaggaccaaaatcatttaaatcttttggtaaaacaacaaacgctgtcaatttattttgaattgctgtttcttcactgaacgcagcatctaattgacctttaatttcaccatagattttaccccaaacggctacgccagaagtttcagattttaagaacttcaaacgcaaaccagcgtttttaatacctaaatcagctaataacggatgattcgtcgtcaaatcttcaaaaattctatcaattgtttcttctggcaaaagtttttcttctttatagttaacgtttttattgatatccatgaagaaacttctttggtttgcactcaaagattgtgctgatttaggtaaactagaaactctttcagcttctgcttttgcttgtaatttagtttcttcaaatagttggttaatcatgtcaccgtacaattcattttgtctttcttgcggttcaccgttgtttactgcattaataaattcgtttttcgcatttgcgaatgtttccgataaatttatagtcattttatgacctcctattttttgtattaaaaaaggaatcttgaaaatccatttgctgatactttactatctgcaacatcgatttctgattccttttctttcatatttattttttcaattactttatttgctattgcgtcaatatcaatgttaacctctggcgttttacttaccaaagctgttacacgatttaatacatctttcgataacacttgtgtattgcttgctacaatttgcatattgtcgttttcaaacattttactatccgcaaaaccttgttcaatggcttcatcagcatttagccacgtttccctagccatcatttctacaagttcttgtttgtttttaccagctctaaccgcatatgcctcagccattatttgaccaacatgttctaatgtttctgcagcatgatttagatctttcgcttctccttgcgcaatacttgaaggattgtgaatcatcattctagcaaccggactcatttcgatgtggtcaccagccattgcgataagcgatgccgcacttgctgctattgctgtgatgcgaacattcactttgcctttatgagctcttaaatgtgtatatatttcactaccagctactaggttaccaccatttgagttaattataatatcaacatcttcatcactaaattctagttgtgttaaaacatctttaggacaagtcgaatccataccaagcatttcgtaaacccatttatcttcgttggaaacgatgacgcctttaatctccgctttcatcttcatcaccacctttcaaagtgttttcatctttttctttttcatcattttcaccactgttagctttttcgtagtttttagtaatcaggtattcgtctaattcaggattgtctgatggttcttcacctaacataatccgcacctcattccttgtaaatgaaccagaacttacaagtttgtcaattgcttcagcatattgaagtgggtcttttttattcacaccgacaatttctattcttgtatctttcaaatacatgctttgtgttatgagtttcgcgtttaattcgttctgaatcttttttaataaaggtgttaaacagaacttctcaaatacaagcgtgttcttttccaaatcagctgtttctccgtaaatcaaacctggaggtataccaatcatcaacgcaacattttttattgcatctctcattagctcactcaattcagaaaaaggcatgttactattcttaccaccattagataattcctcataatcaaaaccttctatcaaaggcgcgattgctagttgatttttattaaaagtattgaataatttatttgtgaacgcttgtaatttttctatattcttttcgtcatatgcgctagaggcagatttcaaaatccctcttatttgatagttttttaattgtgcacctatcattcttccgaatattttcccgtaatcttcgaatagactttctacaaagtgtgtcactttattgttgttgtactttaaatatatgacctcttgcattgtgaaagtacgttgataagtataatctttaaccgttacatctttgaatatatcatcatacaaagcgtactcttctctgtaaaagctatctgcgataagtaattctttgctgtcacttactacgattaaaacctcgttatcataaattagtttatatataacttgttgccaaaaactatcgcttgataagtcagtatttggttttatatttaacttgtagtaaacatcattcttttgaattctattaccttccaatactttaaaatgactttgagcgacagctcgcgcaacaaattcaatacaactatcaatcgctaaacgtttcacatacgcttgttgtgatagatcttctatcatatctaaatcaagcatatatgttatatctttcctagttttaaatatcttttctagaatactcatgtctcacctcctctattagaaatctatactcattaatgcatcaagcgctttagacatgtctttgtctactatatcgtctgctctatataatgcgtgaacaaaagccatgaacccatcggtttttcttctattttcatcttttttaatatattctttattaccatcgggtttaacctttactgcaacattattagtaaaccaacgcatcaaaggattgtctccatatattacgttatgtttcgcaaacattgtatcgatacgtggtgcaagtaatccatgtattgcttttggatttctaagtacttcaagttttatgccagcatcctcaaacgcacgtcttacaatatcagttctataattatcagctatgactttttcaagcccatatttttctctagcctttaaaaaccaatcaactatatattcaatttcaatgacatcatcatcgacaatggtcaataatcccattttttcccattctttaataggaggttctaatttgacatcatccaaaaacccttgtcttacaaacgaatgtcctaaccaaatgtaatcatcgttttttcggaataatagccctacacttgcaaaatctcgaatgtttgcaaagtctaaaccaccaatacacatttgattatctaaatttggtatctctctattagtcgctagtatttctttccatggtgctattactttttcaaggtcaacttcaggcaaattcattcgcttagtcatgaattcgggcttatttgaacggttgaatggtaaatcgttatattcttcttcaatcgtacttagcagtgttttagcgtattctgataacggtttatgtaacattgggttcgccttttcccacgtctgtctgtcatcaacttcttttggatcgtctaacttacaataaaaagcaaacaatctactatttttaaccttgccacttaatacacttgcaattttgtgcttcattgcatcgatataaccctctctaacaaaaccatcagtacttatataaaacgttcttctatttttctttttacctaatccaccacgtttgacgtttaccatttcaggaccaaagaaataatgaatttcatcaaaaataacacacccctcacgtccaccgtctttggtttttgtgtttgatgtgttatatcgaataaccgatttagttgcacggtttattatttttgctttactaacttcataaggagcttttggcgttttacccgtcttatttcgtttgttatccattaaaacggttctgatttcatcaaacgatgtttttgcttgatcttcactattagcaacaatggagatgtgatattctttaactccgtgtaagggcgtagaaagaaaatcactaatagcacttattagaccgtttttcccgcctccacgtcccatgaaaatagcaaattctgtaaagaaagcttcatctgtatttttatctataagaaatatattagctatgataaacctttgaaatggtaatgttggaaaataccatttttcaataaatttgatacaatcctcgattttctgttcatcaaaatatacatcatctcgtgaatatatatgtttttgtagataattaaagagatcaattctttctttatttaaaattatctttccttgtttccacaaatttatatattcatcaacgtatttattactaatcataggtaatcatcagatggcgtttctgtgtcttctttctcttcgggcaataaatccgataattgtttgattattttttgatatgcagcatctctagcattaaatagtttggctactggtctttccctttcatatggtggcgccttttcagattgagtaaataaatcatagtcacctttttcttttatgtcttcccacatgtaatcaagcattacacgtagccttgctgcttgaataattaaaccatcaactacttttaatttattgctaggtatgtctttatataatacttgcagcctttctttttctttaagcactaagttttcatcaactataatctccatttcatcacctgccttaaaatggttataagagggggggtatacatggatttttaaaattatcgcgaagtcgagcccctccccgttccccaagtattttgatcgcttttgatttttttgacccgggggtatttaccatttttcgtctttccatttattttctttttttataaatctcttttcttttttgttgtgacatttaatacacagtgtttctaaattgtttaagtcatgagcaaactccggatgatgttctagcgataatatatgatctacatccaacgacttacgcttgcttttgtcatatgtcgttaacttgccgtctctcttacattgttgacattcataattatctctttctagcactctttttcttgttgtttgccattctttagacttatagaatcgtatgcgttcgtctttagtcatcataatgtttcaccttatataacttaagtagtatcaagacgcatctatacttgatgtgtagtaatgtatttactattagtttgaacatgttcatacctcataaataaaaagacacatcacatagtgatgcgcctcttgttcatgcgtcgtattagcatttaataactttaaatattaatctgatactaacataataaactgttttaatgcggacttacatagggtaaaagtccgctacacataaccaatatactttgctaacttatcgatcagtgcattccttctacgtaatatacttgtcttacttgtaccaaagtaatgtgctatatcttcccattcataacaaccaataggacaatcccaatatctaaaccttaataactcaagcgtatcctcatcactttcatctatcaatctatctacaccgttaactatatttcttaatgtattgtacctgttatcactaaacttctttattgcacatcgttcaatcgggttacccggcaaattacttttgccagctcccgcattatctggttcatgactttcaagtaattcatattctcgcatcttcaactctcttcgatagttatcgatgtgctgaatgtattcttcaagctttttgatatcgtgtttctcaatctttatcattcaatgtaatacctccgataatataaattactttttaatatcgttattcattcgctttaattcaatcctgtattcttttaacccgttgtatcctttagttttaactacttcatcaagtagataatcattcatatatctgagcgcttgtatctcccttgcacgatcactattaatactgatacaaactaatagcaatatagcaaatacaatagtcatagtaatccacatcactcacttacctccgctcgaaagacgtaatcactcggcgcctctacatcatcattagccgtcatcataatatatacttgctcagttacatacttacctaactcatacatcgctagtaagaataataatcttagtatttgcttaatcattttttatctaccttctttacttcgtataagaccggatataaatttaaaaagtgtattctatatccaatcgtcttaacttttactttatcacctacttttaacctagcttgtatgtctgcgctatcaaactttcctttgaagaataagtctgagttttcgatgacttgtttatcatctaatacaatatagaatttgtcctctttatcttgtcttttgttatatttatctgtaattgtcccttgatgtacttctttgttttggtaactagccactgtatagataggcaatgcgacaacaagtagcaatgcggttataccgaataatgacagtattccaacaataaagatgtcgaacccatccatatttttaagttttttaatcatttcccacactcccttatattttcaaacaactgacccactttaataactgcatcccttttaacttgtttctcgtacttctctttcgcttcttctttactctctgcctcaacaactgtaaacctttgattactcttagctttagttatgtgtgtatgtttacgtcctgttgaatctttgaatgttgtgactaagtattgtgtcattcctcatagctcccttgaacttgtttgagcttactcataaaaaacattactaaaaatgctattaagatatgcgtcttttgatgtttataagcaaatgtagatatcataaagatagtagcaagcattaacatttcatatatgtttgtgtgtatagtctttttactcttaagaaaaataattgctatgcgataaaagagataaacgccaaaccctattaaaaatatttctaacatgtcgctcacttccccaaaacctccttgactcgatctaatatgtctttacactccgctacttccgaagccttttgctccacgttctgaaacactctcgaattcctccacttgctttagttcaggtgtccatataggcacaataaccaattgagctagtttgtcgcctttgtttatgacataactaccattcatacataaaattttatctgttacaggtagtcgggcatactttccatctatcccagcaggactccgaccaaagttactcatatcctcactctctaacgtttcattatcattcttgatattaatccctaaattgccgtgatatcccgcgtctatcttgcctgtttcaatcactaaatgcgttttactacttacaccactacggctagttaatagtccgacatagccctctggtatgcttacagctacatctgttttgatcactgccttttcttgtggctcaagtacgacagtttcagctgagaatatgtcataacctgcatccgtcttatgatttcgttctggcattctagcgttttctgataatagctttacttgtaggatgttagtcattttccttgtcctcctcatcaattccagccaattcatacataacgctctccatacttttatcttttaaatcttctgacacgaatacctttaaatcatggaattctgtaattattgttttttcgtcatggtcgatgtaaatttctagcgtaccatcagctaaattaaaaatagctttatcttcattttctttgtatcctttttcttttaatttcttcaaagattcattaattttcattttcctgttcctcctcatattcaagctctcttacttctctcaaaacctctgacgcccagtcttctggatactcaacccattgcgcattaatagcttcgcgaatttcatcaaacgcttgcgctttcttatacacgtcttcaatctcttttagcaatccctctgtgtcattgccgttatacgcgctagcactgataactgattgttcgatttgttcgcggttattcatttgtgtcatcctccatttgccctaaaaattcgtagaactcatttgttccgtctagtttgtccattcggcacaatataacacttaagttgatttcagctcttctatatatagctacttccttgttcgctctgctctcaatctgtagttcgctaagtctaaaacggtaaaattcgtatcttccaaacaattcatttttaagcgtgcgccacatgttctccagctcttcgttacgctctcttaacttagctatatccccaataagctcgtcacgttgcttcttgtactcatcacgttgttttctcatcttcttcaacctagcttccattacgcctatttggaatcctgtttcatagttcactttcataacctcctctaaaataaagttagttgcttctgttcctcatattccaaaccctgttgctttatatatgtttcaagctcttcagctgtatcaaatgtctttttcacgccttgccaacctggtacgatatgcccatgaaagtaataagtgccgtttactacatgaatatgtgccactcgttcgttatcctgatacagatatctcttagatccaaagaattgatttaggtattctttgcgtgcgttatctgtcatgatctacttcttaactttcacgaatatgtcgttttccatcaggtagcacgcataacgtcctcttggatgtttctgtggtacattaaacaaatgtggcttctttcttcttagctcagcctctttctttcgctttctttccaatttgcgttcgagtctagcttgttccagtctttctattgttttcttttctctgtactcgcttaaacgcgtaccttctggtgcgtccattgcttcatgtagttcccaaccgtcttttactctcttagaaaccattccagcggttataccgtgactttctattaattccatttcagatttggtaaacctatatggtttatcatttattgttacaatccttgcttttctcgccattttatccacctcttatatttcttctattcgtatgattattttgggctcaattccataacgctttgagctagttatttctgtaatttggttatcgtctttccacaaataattgttacaagcgtctagaactgtcttcatcaaattatcgatatctggtttagttacttttaattgtccaatcgcttgagttttctttttcttcgaccatgatttaggtggagtaaagtaaaactctaattcaatttttaatgcattttctagatttagctttggcatttgattttgtaaatattttttatgttctgtatattttgtaggcatatatgtgtgtgcatatctaccttttgtgctaaaacgcggtcgaggcgagcccatcggcgcattaaacacttcattaaatttaatttctatctccatgtaatccctcatatatattcaaataagcttgtttggtgtcctaactccatttgttcattatcaataagtgtttttaattcataatcatctaagtaccaacgtcgaccattgaattttgtgtgttttaatccaacaactaaatgccgtccatctttaaaatgtggtgtaactgaaaacattttgttgccgtcatgatcaaatagatagtatttatcaaatgcatccattttcaatcactcccatttgctatttagacgcttaataaaagcttctctgtctttctcaaggttttcatctacttccggcgttttcgtttctctcgtgctgtctgtgagccatttgggtgttttttcttttgattgtttaacgaaaggtttataattttgttttttgctttcaagttgttgcttttcaaatgcacgtacttgttcaatagatttcaagtttgcattaagccatgtattcaaaatgcttttagcatatccccaagtaactttgtttctgtctttagcgattttaagtgatgcggtaactatttcatctgaatcattttcaaatgaatcaagataataatttaaatcgtctaaattgtaagaagttatgaaaccgaatccgttatcttggaagaagtcgaaggcggttgtcttcttcttctcattattcacattcttttcattattatctttattatcattattgtttgtgttggtttgatgttgttttgatgttgggttgatgtttgactgatgttgttttgatgttggtttgatgtcgttttgatgttggttcctgccctgctcactttgataaaagtcataattgacaatggttataagggtatattttgatgttgttttgacttctaacattccatcactctcgagtaagtcaaggaaggttttcactttaaatcgtgaccagttaaaaaggtcagacaaggtcaaaatagatgttaatctttgtcctctttcaacggttacaatttggtttcctataggcacttttgcctttgaatgattcgcttccatgagtaaatatatccatgcttcaaactttgaaaatgttctcttttctttaaatagccaatgattttgaattgagcgatcaatacttatccaaccagtcatatacacacctcactttcaaaccggttaaattagaatggtaaatcatcatcatttagttcaatcggaccatttgcattcgcaaacggattatcttttactggtttgttatttgaatattgcgattgtccacgtgtttgttgtacttgttgttgatataaatcttgttgagtgtcatttgagtttttcggttctaaaaattgaatactatcagcaataacttccgtaacgtatacacgttgaccttccttattttcatagttccgcgtttgtaacctaccatctacgcccgccaacgatcctttagataggtatttattaacgttctctgcttgttttttaaatacgatgatattaataaagtctgcctcgcgctcgccttgtgcatttgtaaatgtacggttaactgctaatgtgaatgatgctacatttacaccattttgagtggttcttaattctgggtctctagttaaacgaccaactaatattgttctgtttagcatttataaacctccaaaataaacgggcgcgcccgtcactttttgtatttcacttttaatgtattttgcatttgaattttgactacttaaatgaattaaatgtatttcttcgagtctagttaaatcatttgcttttaacattccgatagcatgttctaagctaaaatgagactccataattctgtttgctaatgtgctgtgcacactgccgttttttatgttttcttgcatttgttcatagatataattaacttctagcatcatgtgcgtaatgccattaaatttgtatttcaaatactttgtatcagtaacatacagaaccttataacctagtgtgctttgtaataagaaagccacaggctcgttagcatcatgttcgatgtcaaacggtagaattgaccatgtacctattcgcagctcttgctttgccttaatcgtgcataagcgatgactttcaaaattcatagcttgttgtgttccagcagtcatatagctgattacaccattgtcgacaaactgctttgtatactttgcatgatcaccatgttcgtgtgtgataagacaccctgctatatgtcttgttttatatttgaaatgcttttgaacacgttcaaattttatacctgcctcaagtagtaacgtagtacgtccatcatttaagacgtagcagttaccacttgaaccagttgctattgtttcaattaaaatggctcttcttcgctttctttttctgttgcaggttcttttatttcttcaaagtcagatacatcaataggcttatcattttctaattctgtgtattgtgcttcttcaagaactggttgttcaaagtccaattgttcttgatttgcattttcttcaacttctgcgtccaacacttctttgcgttgacgttgttcggattcttgtgcgtatttgaaaagattgctatctgttgatgtgttgatataacgtttagcagctctattgataactgtttttttagccatttcttctttgaaattattatgtgttttagaattttgtaatgctttttcatctttaatcattgatgactgcatccatgcttgtttaatttgttcaatagtcatgacttcaatatagttatctcgtccatcattaaatacgattgtgcagtacgcaccgataatgttttctttgtcgatgttaaagaagtcttgttcgtgtttaatcgctttgatacgtcctgtttctcccatttcttgcttgaatgtatcgcctttataaatcacttgagcaacaacatcttgagcacctgcatcacgttttaacatcattacattaccgtgatagctacgttgtaactgcattttgttgccgtaaggaataaagtagcattgatttttagctggatttaaaccttgcgttaccatgtctaataaggcatttgctttgcttgtatcgttacaactcattaatttgttatcttggctgatttgtaaccatgcttgtttcatggcattacttggtgaataatcatttggcaattccaaattgccttgtgactctaaaactctcactttgtttaatacgttgtcagatacgttcttttcttgtactaattgttgttcaatagtttgtaatttattattttcagtcattttatatagtctccattcttaattttttatcttgttcatttactatcaattgaatttgttgtgattctgttttgataagctctgttactgattcagcattatcaataaatattggcgctgtaactttaaaatgttttgacagtgtattgatgatatctaagccaacattaattcttgaggcgttatttaaaccgctgtcgtattcgacgccgttaaccgttgtggaacatgtttcttctaattcgccgttaactaaggtattgaatagcttaaattcagcaatttcaaattcattattgatgttttcagtaagcattttgacttttgttgttgtaaattcttttaagatataaaggtcatgtgaatacttttctttttcatccaataatctgtcttcttcatttcttaattcagaaataacatcatctagatgtttatttgatttttcgattgatcttgacacttcaatttctgatttttcttgagtaagttcgcttattttgtcatctattcctgaaactttatcttgaatagttttcctgatgttagagcgtttttgattaatctcatttatctctaacattactgctttgtattcgtcagtttgcgtaacgtcaacgtgagttgttttcaacttattaattttgttttgtattcttgctgaacgctcttctgcttcgttgattttaatttgaagattattattgtcatcctctaacttctcgatgattagctttattttcttgccttctgaaataatgtgattgatagatgtttgtattgtttctaattctttcgatttgctagcattgaatttctgcaatgctttttctcttgccatatccacttgttcaactggtaacttttgaccacaacaactacatacattgtcatcaagatattcaaatttttgatttttagctttttctaaatcactttttaatcctttatgattttctaataattgattacgtctattttcttcatgcgtgatttgttgtttgttttgctttaatctcgttttaaggtttgctaccgttccattttcaacgtgtaattcatttgttaaagcatggattttgttctcattacttgcgctgttattgtcttctatgcgtttcaattctgattgtttatcagctaattgattacgtaaattaatttcttccttaccgttttgaatatctatacgctcattttcaagttgctcaatttcttgtttgataattgcgtatctatcattatcgaattctggtacatcctgcttattttgttgtgtttggttaatacgtatcggaatatctttgatatctttgttaatctgttttatcttgtccgtaagaatctttttctttgtttcaatttcatgatctccaagaatattatttagttctttaaaatcatcatttgttttaatgacatcctcatcattgattggtttagcaatttcaaacaacaaacttcttcgcttcttccaatctagtaagttaaatgcttgagggttcgtaattaacttgaatacatcttcatcaataagttcatcaatacgagctttataatcctttacttttattgattcatcattgatatattgtttcttcgttcgacttcgtgagtattccttgcgattcgtcttttgatttattgtgtatttaggatgtgactcttttttaaaagtcgtaatttttccgtcgatttcaaattctgcgaaaacagtcggaattaactcataattttcttcgtttttttcgtttaaaggtacagggttaaatgatttggttgaaccgtccaaacctttatcgaaaagcaaccattgtaatgcggttgctgttgtagtcttaccagtcgcattattgccgtatatttttgcatctttaccgtcaaaattaaatttttcttctttgattccggcaaagttcgatattgttaatttatttattttcatatccttcctcatgctccttttttaatcttccgatgacctcttagtacctcgataattaaattttttattcgttcatggctgtctggattgatttcatgtatctgcacaagcttattgtttgttttgtaactgtcgtgatagtgcaagaaattaatcgataagtatccgtgatgattacgttcaatttccaataatgctcgttggtttgacaaagtatattcgtcgaataacgtcttaaaaatattcaatatatttctttctgtatctctcatgcttatacctaccatttcatgactaagttcattagtttgtcctgttcatctgtgttattttcaatccattcataaacactttgtttcaaaatatctaaagctgtgtatagatcgttctcatcagaaactagtaacccgtcaattgaatttccttcatggtctagaacaaccatttcgacgctatacgctcgtttcttaactcttaattgaaaatcaaagccatctacattaattatttttcgacatacgtcacccgttttgtaatacattgttctcgtcctccttgtcattatctatagctagaatttttaacgcattttgataacatcagcgatatctcggtaaacagctctacgtttcaataaattagcaatatcaacaacattcccaatcacacaatgtgacgacggtgtaaaatctccgttgctaatccctacatttgaaaaaagtaaaacgtcaaattcagtttcttcatcgatttcgctcgctaaatcaaacaattctgcattcttttcagccaataaaccccttaattcgtcttgagtcatatctttataatttttagtcatggttgacttcctccttgtttcgttttatattgaaaatgaattaattttgttaatcgtttgtcactgttacttgttgacgcaagtagcagtttttttattcttcataaaagtattctttgtagtatatgaatgttccaatgcttgcgaatcctgcaattgaccacgctgtagtgaagtacagcaatggcataagcacaatcgctaagactgtgaaacatagcactgctaataggtagcttttatatgtgtcgctcattttattctctccttatatatttcattgaaatgctcatcgacgaatttattcatctttcttgcgttaaatctccagcgattaaaactctcatctgggtaatgcacaattccttgcgctcttagttctttttcaaatctaggatgaaatagtaatctgtccttgatagtctcatcagatgcaatttttaatttcttctttaagtcactcatgttccatacagggtctaatgaataaccaattagctcatcatattcatcttttgtgataagtacatgtgtttcaggtattggaactgttacgtttaaaatgtgtggcatttctatctttcctttcgtgtataatgttgttatctcctagtgaaaggaggtgataagtatgcataagagattgctcactcaatatttagataaagaaatcgttacttctttagatttacatttaattaatggtgaagttattaaagtacaagaacatatgaaagatgctgaaagcaaaactctacacatcatttatccaaaagatagagttgtcagtttagatcatgttttgtatttcgacattaacgttaaaggtgaaaagaataacgatagtccttatccatcttaaaatccatagtgcttatagttatttgctatttgttgacagttatcactggcaagtcctaccttgtcagcttggtaactgtattgattatttacttcatttactaatcgattccattcgtctcttggtatatcttcaagaagtaagagaatcatctttaatttttcttcgttcatttgttattcctccttttaagatgtttgtttttctcctaaaaacttattaacaaagtattgttgtcctttgcctgttacttttggcgtcttactaattgatgtgtgaccgtccgaatgtgtgattgatgtttctttaatttcgaataactcacgttccattgaatactgtgtaggcatgttataatccacacccttgcgtttaataaggaatccgttttgacgtaaccactcaaacaatctgcgttgcccgatgtttacaccgttttgtttaatgatctttgctaactctccaactaaaattgatgtcttagtagtagctactgcatctgcaaatacaatttttggtttatcacgttcaatctttgtttctaattgattgattgtgttgttagcaatttttaaagcacgttgcataatcatttctgggctgttccatgctttttcaacttggatgaagtattgtcttgcacgtttaccaggttcactacgttgaatcattgcgatttcttttgcagtgtctagtgtgagtgcgtggtcaatatagtgtgtcatattgccttgagctgttgctcttttttgagcgatagctgtgtaatctgtattttcttcaaatccgtatttaagcattcttggaaaccaatctttatatgctgtcttaacttctaatgcttgatgaagttctcgaccgctgattgcgatttctccattttctttttcttgaatattgaacatttctccgatgttcgaatttgtttgtaatgcttgcatattgtttatgctcctttctgctatactcctattaaggaggtgaatgacttatgactaatgaagctaaatttgtccttttacaactttattcaatttaccttgatagaattgacgaaggtatgtctaaacgttctgcatcttatttcggtagtgatgaatcctcatttaacgctttctttttagattttaattttgaagactatatcgatgcagttcttgaattaaagcatagagattttgtaattgcttctgctgaagatggcggttttcttgagatggctctttctcgagaaggtatcgcctactcagaatcagaatccaaaaaagattacaaaacacttatggatttaattagagatttgaaaaaattaataatctaaaatccaatcatctgctattaaatcgtctgcgctaggctgccaccttccggcggcggtttgtctttttttcttatagtgtctagatacgactaggcattgataacgctgcaaattagttggtaatatcccatacacatcttgattctctctccttatacttattcctttctccatcgctagcttcgttgcttcttgaatgttcatttgttattcctcctattaagatgtttgtttttctttaaatgctaaaataattgatttctttttatcattcgtaaatacgaaattttcgtattcattacctaaaaaaatatcatcatatttaacattaaaagcactcatatacttagaaagtaaactatctttaatgtttgtagagtctttttccatattttgaattgtacgtgatgagaccttaaataaatctcctaactctttttgagtcaatccgtaatcagtcctcaactcttttaatgttttcatgttgtcaccgcctttcgtaaacctaatataatacgaaattttcgtattgtcaacattaaatacgtttttttcgtaaaaaactttactatgatatgaaaatttcgtataataagaaaaaaggaggtaagtaatatgaacaaagaaagaaatattattatagccaaaaacattagaaaatttctcaacgattcaaatatgtctcaaaagaaacttgctgaactcattaacataaaaccatctactttaagcgattatttaaatttacgttccaacccctctcacggcgttatacaaaggatagctgatgttttcgaggttggtaaaagcgacatagatactacatacaaagacgataacgacatcacttccatatacaacaaactcacacctccccgccaagaaaacgtacttaactatgcaaatgaacaattggaagaacagaattctaaaggagataacgttgtagatattaattcatataaacaggagaaaactccagttaacgtcaatggttgcgtctctgctggtgtaggagaacgtttacacgatgaaacgctatttactgaaatggttaaaggacctatccccacacacgatttagcgttaaaagtaaatggtgattctatggaacctatgtttaaagatggcgaaatcatatttgtggagaaaactcacaatataaagaatggacaaattggtatattcatcattgaagaagaagcgtacgttaagaaagtctttgttgaagatgatagattgactctagtttcactaaataaagattacgacgatctacacttttatagaaatgaaagtgtgaggttaattggaaaagttattttataaaaggagcacttgcaaatgaaaaaatatgatattgcagtcttagactttgaaactatgaatgaacatatgaacagcccttgcgaagttgctgtatctttaattaaggatttatcaatagtaaaagtttattcatcttatattaatcctcctaataatagatataacttgaaaaacgctaaaatacataaaatacctgaagatgtcatattaaaagcacctaaatatccagatatttaccaagaaattctctatcttttaaaagaatcacatttaattattgctcataatgcactttttgatatttcagtattaaaaaatactaataattattatgacttacctgttccaaacttcatgtatgtcgatagtataaatatctttagaagcttccacgcaatctctagttttaaattagaaaatttgtgtagcttatatgatatcgataaagaaaaattacattctgctaaatttgacgtgctagctttatcgaagatgttgatatcactcgctaaaaacaatcagcattatagtgtattaaaattaatacattatatgcctaagcaatacattagatttagcaaatattctaactctccaactaaacttttcgattcaggatttcaaaaaattcatatgaaaatatctgagattaataaaatagaagtggaaagtgtaatccctattttaaaagataaaaatgttgtttttacaggtaattttgacactgaaaaacaagatttaatgatattaactagaaagaaaggagcttatatcagaagtgacgtaactgcaaaaacagatattttagtcgaaggtgttcaagatgataaatataaagatgtgaacggactagtttcaaaacaacgaaaagctcgagaatatgttggaaatggtgcaaaaattcaatttttaaatgaagaagacttaataaatttaataaaggaataataacgatgatcaaaaaaatttttacaaaaaagcatgtattcttagttatagaagatgaaaaccataatcacagtgatgctgtttttggaaaaagtatattactttcaatttacgtcggtgtgaataaaaagactaattctaaatcagggaaatttatataccttgacagatctaaaagaatcgttagacaatctgatatcaccaaaatagaatcagctaacgaaaatgatgtagatttttataatttactgaagaaagaaaaggaaattgtttattccaaaaatatagtagataaatacaatttagcgaactatataatttactacgaagttagtactaaagaataaaccaatccattatttcataatactaaccttaaatttacagaggttttaattatgaaacatgaaaaaagcaatcttaactttaagtcttatatttattacctactacctcacttttaaatatatgtggattaaagaattgaagtattaattatgcttatttaaaaaagacgtctatttcagcagtgtttgaaaggaagtttataatgaaaataactaattgcaaaataaaaagagaaactgtaatatacgaagttttaactagtggtaatcaaccattcacttatgagttacctaaagatttatcgtcacataatgcgcgtaaatacttggaatttatttcacaaaaaatagatggcgataagttaaccaaagaagattcattatgattttactaatcaaaaaacgtctacaagtgtagacgttgaatggtggtgagagtgtgagcgagaataaaggagaaatgatgacgcataatatagaaaaacgcattaataaattaaaaacttctggaaatccaaaatttaaaaaattagattcagatattcactatttactcaagagatttgaaggtgaaaaaaaccataaaggtttttatccaaagtttaaacaaggagaaatagtttttgtagatttcggtataaacgttaataaagaattctctaattcacactttgcaatagtgatgaataaaaatgattctaatacggaagatatagtaaatgttattcccttatcttctaaagaaaacaaaaagtatttaaagatgaattttgatttgaaatgggagtattatttaagattgtttttaaatttaattagcgcgcaaaataattcagctatattaaaagaagttttcgataaaaaataccaaaaaaacaacacagaattcatcactaaagattattttagtgaatttatatctgatagtttagaaattgaaaataaattaaataaaattgacagaaacattaataacatagtatcagcaattgataaggtaaaaaaattaaaaggtaatagttacgcttgcataaattctttccagccgattagtaagtttcgcataagaaaagttttaccccaaaaaattaaaaatccagtaatagattcttcggatattatgttactgataaatagaattaataataatatattgcagattcctgatataagatgatataattttaatatattaaaggtttatcctttaaaacacgtatatattcgttaccatttttggtaattaaccatgtaatcttataactataagtggcgtctgtattttatacaggcgtctttttttatacaattttcatgggtagcccgcctacccttattattttttgccaattttgaggagggaacgcatgaaaacacgttgttacgatggtaaaaaatggcaatatgaatttaagtatgaaggaaaaagataccgtaagaaaggttttagaacaaagcgtgaagctaattctgctggactagacaagttaaatgagttaagaagtggttttaatatagataactatataactcttgaagaatacttcgaaaattggattaaaacgtataaacaacctgttgttaaagaaaatacctaccgtcattatagaaatgcattacaacatatacaaaaacataaaataggtaaaatggagttatcaaagataaatagacaagtttatcagaaattcataaacgattattcaaaagaacacgcaaaagaaactataagaaaaacaaacggtgctattcggtcagctttagatgacgcattatatgatgggcttatttttaaaaatcccgcttataaagttaattataaagccggaaaacctacgaagtcagaacaagaaaaattcatctcggtaactgaatatgaaatactaaaagatcacgtcagaaagaagagaactcgttcatcattagcgctattcataatgatttgtacgggttgtcgtgtcagtggtgcaagaaatataaagattgagcatatcaaccaagtgaaaaacactatatttattgacgagcgaaaaaccgatacttcccctagatatatcagtatcgctaaatctgatatgaaacacattatggacgtcataagtacatttgcaattagctatgatggttacattttcaaagaagccggatctataattaaccttcatgctatcaataatgctttgaaatcagcctgtagagtcaataatatatcaattattacatcgcacgcattaagacacactcattgttcttatttactagcaaaaggtgtatctatacattacatttctaaaagattaggtcataaaaatatagcaataactacatccgtgtattctcatttgttagaagaaaaatttaatgaagaggacaaaaaaacaactaaaattttagaaagtatgtaatttagggacccattagggactccaaacccaataaatactgttgttacaaggtttctatgtatccaaactgggggcaatataaacgcgctgatttaatcggacaatcttcttatattaaaaataatgatgtcgtaatattcaatgaagcatttgataatggtgcatcagacaaattattaagtaatgtgaaaaaagaatatccttatcaaacacctgtactcggccgttctcaatcagggtgggacaaaactgaaggtagctactcatcaactgttgcagaagatggtggcgtagcgattgtaagtaaatatcctattaaagaaaaaatccagcatgttttcaaaagcggttgtggattcgataatgatagcaacaaaggctttgtttatacaaaaatagagaaaaatggtaagaacgttcacgttatcggtacacatacacaatctgaagattcacgttgtggtgctggacatgatcgaaaaattagagctgaacaaatgaaagaaatcagtgactttgttaaaaagaaaaatatccctaaagatgaaacggtatatataggtggcgaccttaatgtcaataaaggcactccagagttcaaagatatgcttaaaaacttgaatgtaaatgatgttctatatgcaggtcataatagcacatgggaccctcaatcaaattcaattgcgaaatataattaccctaatggtaaaccagaacatttagactatatatttacagataaagatcataaacaaccaaaacaattagtcaatgaagttgtgactgaaaaacctaagccatgggatgtatatgcgttcccatattactacgtttacaatgatttttcagatcattacccaatcaaagcctatagtaaatagtgctcaactaactaataacttgcttcgttctaaaaggacgaagcgagttatattgttaaaatttgaattgacttacattttaataaaatcatcttaacaactttaatttttcattaatacaagtctttactctacactcaaacaagattcatacactgcacgtcataataaatctatctattcaaatataaataaaagttacctactacattctatgtagcaggcaacttttattacttatttcttttcattatcattaagtacttttacaaacttcacattatgtgtcttccaatcaacttcatataatgctgataatttttcttcttttttatctacatggttttcaccagaccaatagccccagaaaccatggcgattccaatctattttaaactcatccattgatcttttataatgaacaacaaattgtgatttacctttgtcttttttatcatgtgacataacagctaaaaattctggattaaacccttcagacacagttacaggcattttgtctttaggtgtgaaattatctttcgcccataaatttccatttcgtgttaaagaaaaaatttcacttttagttctattatcactatcattagttaattgtctcgtatggtcatgtcccatattatttatcaaatgtgcttctactttccaacctacacctttatgtgacgtagattgatcaagtaatgtacgatatgatggttgttgataactaatcgtctctgaataattactctcttttgtaatatttccagttaagcctccacgattaatcgaaaaatctccacctgttttataaccatacgtatatttaacttctcttgattcatcctgattttttggtgcaaagtcagtcacatttgtattgttgttgtcatcaacattttgaattgaaactgaataagatccaggccatcttaatgtactattccaataaccatttgggtctaaaattctcaaaccactaccaattgtaccttttgctttaataaatactgtttctttatcataattaggttcagttaagaaattaaattgtaagctttgagtaatatttttttgactatcacttgttgtagctgtacgtgtatacattttagtatcaccatcaagattcttctcagaaacttgtttgatttcagaattaatctttgcaaatgaagtagctggtaatacagtgaaagtagtcgatagtgctaacgtacaaattgtgatatttttacatagttgtttaatcattagtaatccgccctttcaatattatccttctttataaggtttattgtcatcagaatatttatcaacgactttaactgttttatttttccaatcaacttcataagtgacaattaatctttgaccatctttatttttttctaaaattggaggtgcataatgtattccaggtctgtttttcaaaatatcttgatttcgtgtgtatgttacttcaaattgcgttttctcatttgacttttcattagataaataagttaaaaattctggattaaagccacttcttactaatgctgggtatctatattttgaagcaaagcttagttcagggttttctacagtagcaattctcgtatttctatagaataataattcatcatttctatttttcacttctccaccatacttcaagtcattcgcaataactgaccagtgtacatgccagttattatttttaccgctggcaattgtgtcataattttgctgattataactaatcgttttggagtagctatttgatgaagttcgtccaataccttttgttgaatcgaatttaccacctgagctatatgaaaatgtactgtctacttttgcagttgaaattttatttttcggcaattggtctaatatttcagttttacgatttctttttacttgaaaatctacatggtactcacttggatactttaaccaatttgaatttttttcttctttatgagattcaaactttaaatttgaatgaattgagccttgttttttaacaagtaatacattcttgtcataagttggatcatcgataaagtcgaattgtaaattttggagtatatttgttttctcatcatatactgtttcagttcgttttgtgattttaccgtttttcccaatatcatccggtgctgttgaatttttatctttattagtaacattacgtttgtctttttgttgagacttatcaacatgttctttcttattttggtcttgagagtctttatgagctgaatttgcttgagtcgttgctgctgataacaataaaattgcacatgataatgatgacgctattaaaacacgttttttatttttcattgttataaccttctttcgtatgattgatatttgttgatatgtatcgacatgtgaataatatcacaaaaacagagaatatatatttaactatttattaaatgattttgttaatattattaaatactttatcctctttaaaaataatgtgtgtacaaagtcattaatttagcaaatatttttatttagtagttaataaccatcgatttgaaatttatatataattattagctaaataatatcctgcatctttctcatacaatttactataaaattaagcatatccgatatcagcgttaataagatcgttgatactagacagttaatttcatagaacgaaatcaaataacacactactttctgcattttaaattatgtttaagaataaaaattatgtttatataaatatatatactactttgaaaggtgtgagcttaatgacaacttttagtgaaaaagaaaaaattcaattactagcagatattgttgaactacaaactgaaaataataatgaaatagacgtttgtaattatttaacagatttattcgacaagtacgatattaaatctgaaattttgaaagttaatgaacaccgcgccaatatcgttgcagaaatcggtaacggctcacctatactcgcattgagtggtcatatggatgttgttgatgcaggaaatcaagataattggtcatatcccccttttcaactgacagaaaaagatggcaaattatatggccgaggcactacagatatgaaaggcggtttaatggctttggtcgtatctctaatcgaattaaaagaacaaaatgaattgcctcatggaacgattagattactggctactgctggcgaagagaaagaacaagaaggtgccaaattattagctgataaaggctatttagacgatgtcgatagcttaattattgctgaaccaactggatctggaatttattatgcacataaggggtctatgtcatgtaaagtaactgcaactggtaaagctgtccatagctcagttccatttattggtgacaatgcaattgatacactgcttgaattttataatctatttaaagaaaaatattcagagcttaaacaacaagatactaaacatgaattagatgttgcgcctatgttcaaatcattgattggaaaagaaatttctgaagaggatgcaaattatgcatctggtcttacagctgtatgttcgattataaatggcggcaaacaatttaactctgtaccagatgaagcttcacttgaatttaacgtaagaccagttcctgagtatgataacgactttatagaatcgtttttccaaaatatcattaatgatgtggatagcaataagctttcactcgatattccaagcaatcaccgacctgtaacaagcgataaaaatagcaaattaattactacgattaaagatgtagcttctagttatgtagaacaagacgaaatatttgtttcagcgcttgtaggtgcaacagatgcctctagtttcttaggagataataaggacaatgttgatttagccatttttggaccaggtaatccattaatggcacatcaaatcgatgaatatattgaaaaagatatgtatctgaaatatattgatatttttaaagaggcttccattcaatatttaaaagaaaaataagaacgatgctgtcagctgccctattcgcgtgctggcagttttttattgcgaattttaagttgatagaaatagcgatgaatattgtttgaatgtaaatattcaaatatcaacaagcacattttcattgattaagtgatgtaaaactgaaattattgtgctgatttgtcatacatatattgactaatggtcatataaaaagatagcttctaatagttacataaaactcgtaaaaaccttctcgtaaaaggaatgggacataaatccctagaaaacagcagctcaacgagctgtaaattatcaaatacatttgaaaaaagctgatttctatcaaataatttatagaaatcagcttttttacattgtctaagaacttaatgtctctgtctctttggaactttatatttcataagtactattttattgtttaaccttttttttaaataaggtataaatctacaatatccaaataagccccatcgattcttataatagtcaaaataattatattcatgtattactcttattgtatttggtaaaatttcattcaatttttttaaatcattgtaaccatatttaaaaacaggttgtgaggataactttgataccgattgatgtctctttgtattattcgcaattgtttttgagcaaaattcaatcgcaaatgtcaaattatgatctcccatctttttgataatagtgtccaataattgagtcattacactctcatcaaaatacatcaatacaccttcaataataaacaatatatttgacttactattaaaaaatttataatttttgacatcatcaatccaactgtaatctagcatagatttagatatcatcttataactattactttctttaaaaaatgtttttcgtatttctattgattctggtacatctaaatctatccatgatattttttctttattaaatctttgaaaccttgtatctaagccacaacctatattgaccacgattaaatctttattatccttgataagcctcttagtaacacaatctattatcacagtacgtatactaattccaatttgagacatgtcatcacatgtaacatttttgtacatatcatctaaaccatcaaatattttttttgatagtgcgtcttttattattggtttttcgttttcgtactcttttgctcgagctatcaaaggaattaacattgattcgggaattccaaccagttgcttcatttaatcactccttaaaaacattagtaccaatgcataagaaaatttttacaacttatttctattattttttatttaaaatttctttttttaatttacttctcaaatgttctaatgtaataggatctgtgaaccaataatcttctgctttatatgaaattacatgtcctttttttacagcttcaatattctgccatgtatgtgttttttcaaaatcaaattttccgtacgaaggtttacttaaaaatatataatcaccagcatatttactaatattttcttttgaaatggaagcatagccttttttatcttcttgtaatttatctttatattgctttgtcattggcataccgaatgcatcatgaacaatatccaaaccacgaccccatgtagagttatatatgtatatttgcttttcatctggttcaaacacagatgctgttgcttgaccaattttactttgaatttcttttttatcttttctagttttatcgtcccactcttcaatccattttttagctttatcttcattattagtcaacttgcctatttcttttaatatttctttatgattgtatttattgtatgtatatgggattgttggcgctattttttggtatttttttatatttttatccatagcatctacaacaattaaatctggttttgctttagcaactctttcaacatcattttctccaatataatcaaccccttttaaataaggttttaaaattgaagaatctttagttatatctgaaacagcaattggtttgattcctaactttataaaatcaccaacataaaatccagttaatacagcaactcttttaggtttctctggtactttcagtgtttcaccattttcaattttatagtctgtagtctttgtcgagttacttgttttatcgacagatgctgaacacgcagtcaaaataaataaattacataataaaattccaattaatcttttcataatatcatccttttgtttttcaattgatattcattttcaattataaaatattaaaagaattagtcaacgcctgttagtaatacacatcagtaacatttctattttcatttatgatattatctaattattaatttataatataaaggagtatgaaattaaaatgaacaaagtccacaaacctttatatttttatttaatgcttttcttctctacaactatcataggtgcacttttattgtatttaccttttactggtaaaaagccaatatcttttttagatgccctatttatagcttcaagtgcatttacagttactggcttgtccccagttgatataggatcacagtttaatatacttggtgagatagtaatactattattaattcaaataggtggtctgggtatcgtgaccgtaaccctattgacactagtatttttaaatagaaagatatcaatgaaaaatagattcttgattatggttacatggaatattgacgaacctggtggtgttattaagctaattaaacacttggctatttatagtttagtcactgaattaattggtatgatttgtttgtgtttatcttttataccaaaatttggtataggcaaaggtttatttttaagcttattcacatcagtatcagcttttaataatgctggatttgccctttttaagaataacttaatagattattctagtgatccaattgtcattattacaatctcaatactcataatatttggaggtattggacattttgtcgtgatagactttattaattgtaaaaaattgagtaaattatctttacattctaaattagtcttaactacaactagtatcctaataattataggagctattacattctttttattagaacagtttaatactatgcaacatatgggactagttgaaaaaatcggaaattcttttttccaatcagtaacaacacgaacagcgggttttaacagtatagatatagcaagcattaacaaatctaccgcattaatgttaatgctacttatgtttattggtggtgcccctctcagtgcagctggaggaattaaaataactacttttgcagttgcgtttatttttgtactaaattatatacgtaaagaaaataatgtttcagtattcaataaagaaatatctgacaaacatataaaactatctattgttaccattaatatctcatttctatttatcagcatcattacttttatattatcgataattaatccgaacatatcattaatcaagttattattcgaagtggtttctgcattcggaacagtagggttaagtatgaaccttaccacagaatatcatggtattactaaaataattattatattcgttatgctttgcggtaaagtaggactattaactttattaagaacatttataccaccaaaaagtcctaaaaattaccgctacactaaaggacaaatttatctataaaataactatccatctttaataagaaatgaactagtgttttaatctattacattaaaaaaactacctaaacaggtagttttttatttattttaggccgattaaatgtcttatgtctttaattaagtaaaatgcacaagtacacctttaaaaagatttactcaaaactaaactatacctagttaaccgcttgtgattaagaaattttaaatgtggtttcttttaattatgtcaaccacccataaggattttaatcaagcactcattcattcctgcactcgcaatatgcattacttatagaagtggatgcactctcatattatggcaataccataactcccgcaccataatgatttaaataccattatgaatctcaattacaaattagcacataaaaaagacgcctcccataagtctagtcaccaaatggaaaacgtctcgtaattaaaatatatttgcgtgcattctaatttgtacttagaatacatcatactcgttcataatgtaattttctaattagtcaaaactatatacagttttacatcattcccggcattatgcactaataaaaacttactttaatacacgctttaaagattattaaatcagcgttttaatttttagacaacgctattatttttagtttttcaattctattatgtcataattatgtcactcaaaaactgttttccaacattgatttattgttggaaaatctcgaaaatctagtctatttctccaacaatcgaagaattatgcccttttttctccctttaaataagtcataatacgaggcatacatgcaacatttacaataaaatatgttcctacatcgtattatacgaatgctcacacttatagttgtttagtaaacccagatgtattgctaacatacccattatcactatatagtttatgtgcagatagtctttcatttctattaccactatttagtgttattgctttacaattcaaccgtttagaaaattcttcagaatcagctaataatctctttccataaccttttttcctaaattcagaatgtataacaaacgcaaggattctcatatactctgcatttttttcgtaaaacatcattttacacataccacttaaaccaattattttattttcttttatcaaaagcagtaggaagtaatcatcatgattcgttattttctttagtctcttttttaaatcattctcatttgttggataacctagatcatcatataatttacatagttgatttaatttttcaaaatcactgttattaaacaatcttgtaattatgctcatataacccaccctaaaaatattatgtacctattgttacatacaatagatacgcaaaatcatttctcactgcaaatcaggacgtttctcagcgtaaacaaatcatttctattcttttgaaaaatatctgcatatcttcacagtaattttataacagattaataaaattaaaaaaacataacaacaagtattataataaatattataatagctatcgtattaaatagtttagaatatgcaaactgaaaaataaaaatcacaattaaaatactaagtaatgtaaatggtaatagcatcatcagatctttaacattatttctttgttcttgctcccaatcgctaatagccctaaaactactttttttatctataggcgatgtaaaaataccatatattgaaggtgctatacctcctaaaatagcagttcccaaagttgtcattactgaaattactgcgaaagtatcatccgaaagcaataaattcaaactaatgcattgtttattacccatcgaatttattgaccaaatagctagagaaataaacaacccaaaatttaaaataaatgatatagtaatagcaattgtttacaaaacacgaaatttttcatttttatttatattatccatttttctccctttttcttaaatcattttattatatattacaataatcaatctgaaatgttgatgtaatttgaaaaaaatatcatacttttactcctgaaaacctccctaaatcatcaatatgaaaatcagtattaggatattgcgtttacaactcttttaaatctcactcattcttctcatcgtcttaaccgatactatcaataaatactggcaacaccataaaatatatacccaatttataaaaacctaattgactcataatcttctaacggtatatcatccacaatcacagtatgattaggattatcgttagatacatctttcactgccttatctaacccctcatcacctccgtcccattcaccaatattaatgaatataggtacattaccgtttatatcatgcttatctgtaaataatttatgatatttacccaacatatcacgagcttttaaacgatcactaggttttattggtacctctatcagttcaacatgttcattatagactaattgtactttgccactttgtggattttctttatattctccacgcttgactacaacttctttcgtttctgtttcatcaccgactgccgcattcgttagcacatgtaataactcttttgcggttaatacattctcatctataatcttatctttttgttcttgtatatattgcttgatgtgcggctttttcaataacctacacgctgtcacatgtgcgctatttgcgttatatcctgcttttatggcactttgtgttacattcagtgttctaatatactcattcacaaaacgtgcttgctttgcagttaactcactcattttatcacccccacaattttatctaatatggtttcataccataatattacagattgttctgaacaatctaaggcactactaatatcttgataactaagtccttgtataagggagtcaaaaatataaaactctttatcggtcgctaatctgtcaacaatcatttctatgtgattctttataatatgatcattgacattatcgtctgtcatcaattcgtcagaatcttcatcacctattaaaaagaaatcatcagtatttatttcatcatcgccccgttaactagctttgaagtctttagcacacttgcatataccggctgtcgtgctggcgagatactagcattgaagtggtctgatattgattttgaaaacaacacgattagtattactaaaacatattacaatccaaataataacaagaagaaatatcagatacttccccctaaaactgaaagttctatcggtaagatttccgttgacccaaatgtaataaaggtgttgcgtgattataagataaacgttcaaaataattggaaaaacgaattatataatgataaccattgtaatgaaaaaactatcaatgtggatacaaaccattatgtcacgtaccagcatactcaaaaatatctctacgcactcattcagatacacacattgcgcattgctcatagaatcaggtgtacacattaaagaaatacaagaacgattacggcataaagatatcaataccactatgaatatctatgctaaaatcacaaattcatacaaaaaagacgcctcccataagtttagtcaccaaatggaagacgtctcgtaattaaaatatatttgcgtgcattctaatttatacttagaatgaatcatactcgtgcataatgtaattttctagttagtcaaaactataaacagttttacatcattcctggcatgccacccatgttaggttggtcattatttttttctggaattgatgctacaaccgcttcagtcgttaagaacattgctgcaacacttgcagcatgttgtaatgctgagcgtgttactttagttggatcaacgataccttcttctaacatattaacccactcgtttgtagcagcgttaaaaccaacacccggctctgcgtttttcaaacgttctacaataacagaaccttctaatcctgcattttcagcaatttgacgaactggtgcagttaatgctttaagtacaatatttacacctgtttcaatgtcaccttcagcttcaatttcacttactttttggtaaacatttactaatgcagtaccaccacctgcaacaataccttcttcaactgctgcacgtgtagaatttaatgcatcttcaatacgtaatttacgttctttaagctctgtttcacttgctgcacctactttgataactgcaacaccacctgctaatttagctaagcgctcttgtaatttttcacgatcaaagtcagattcagtttcttcaatttgagatttcaattggctaacacgtgcatcaatgctgttttcgtcaccgtcaccatcaacaacagtggtattatctttagttacttctactttacttgcagtacctaacatatcaattgatgcatcttttaaatctaagcctaaatcatcagtaatcacttgcgcaccagttaaaatagctaaatcttcaagcatcgcttttctacgatcaccaaaaccaggtgcttttactgcaacagctgtaaatgtgccacgcatacggtttagcacgatatttgttaatgcatcgccttcaacttcatcagctacaattaagattggacgattagattgaaccacttgttctaataaaggtaagatatcttggaaagacgagattttcttatctgttactaaaatgtatgggcgttctaattcagcaaccattttatctgaatcagtaaccatatacggtgattgataaccacgatcaaattgcataccttcaaccacttctagttcagtgtttagtccatttgattcttcaattgtaatgacaccatcgttacctactttttccatagcttcagaaatataacgtccaatttcttcatctgctgctgaaatcgcacctacttgcgcaatttcatttttattttcaactttttgagaattttcatgtaacgcttcaacagcaactttaactgctttgtcgataccttgtcgtaaaccaactgggttcgcaccacttgtaacatttttcaagccttcttgaatcattgcttgagctaatactgttgcagttgtcgtaccgtcaccagcaatttcatttgtcttatttgcgacttcttgaactagtttagcccccatattttcatatggatcttctaattcgatttctttagcaatcgtcacaccatcattcgtaattaaaggtgctgtaaactctttatctaatacaacattacgtcctttaggaccaatcgttactttaactgcatttgcaagttggtcaacaccacgtaacattgcttgacgtgcatcttcagagaatttcaattgtttaaccataaatgataaacctccatttgtttagttgtgtttcattttcgttctatttaatttatttatgaattaagttctgtattattcaataactgctaaaatatcttcttcatttaataccagatatgtttcattatctcgtttaacttctgtaccagcatattgttggaacacgacacggtccccttctttcacttcaggagtcactcttgtaccatcatttaataggcgtccagttcctactgcaacgataacgccttcgtttgatttttctttagcactatcagttaaaacaataccacttttagttgtttgttcttgttcttttttctcaataatcacacgatttccaattggttttagcatgattgttcctccttaaaaaacctaaagtttagcacttaacattaaagagtgctaacatacatttataataatcaaatttggtcaaaatttcaagtcataaccttttaattaagttttgtaacttcaagttatttacgataaaataaattataaacaaatatttggaggaaaattatgacaagattatgggcatcattgctaactgttattatttatatattgtctcaatttttaccgcttctcattgtaaaaaaattaccatttgtacaatatagtggcatagaactgactaaagcagtcatttacatacaacttgttctatttttaatcgccgccacgacgattattttaattaatttaaaaattaaaaatccaacaaaattagaattagaagttaaagaacctaaaaaatatatcattccatgggcattgcttggatttgcattggtaatgatttatcaaatggtagtgagcattgtattaacgcaaatttatggtggacaacaagtaagtcctaatacagaaaagctaattattattgctcgaaaaatacctatatttatcttctttgtatctattattggtcctttattagaagaatatgtattcagaaaagtaatctttggagaattatttaatgcgattaaaggtaatcgtatcgtggcatttattattgctacaacagtaagttcattaatatttgcattagcacataatgatttcaaatttattccagtttattttggtatgggtgtcattttttcattagcatatgtttggacaaaacggcttgctgttccaattattatccatatgttacaaaacggatttgtcgttatattccaattacttaatcctgaggctttgaaaaaagccacggaacaagcgaattttatatatcacatttttattccataataaaaaaaacgaatcacacacggattatcgtcgctgtgattcgtttttatttttctttttatttcgctttacaaataagaatagcatgattgaaaataccaccatcatagaacatacaattgctagccaacttttactatatgcagttgacgcacttttcttattatcttcttgttttttaactactgtaaaatcgtctttttcatgcggttcaaatgagcgttgttttgaatccggcttatcttcgggctttttcaaatctggcattgatccaatttcaccagtaattaatgcgagtacttgttcatctaaattacgatagtacctttctgatttcaatggattgaaatattggaatctaaagtaattcgattgctgttgtaatccatttaaatatgcatttccgctgaaattttgttttcgaataatattataaatgtcttcatcagtaacttctccataatctttgcccaacttattaatttgatttaaaatatacggattatacttgtaagccccatttgccaaggctaaaaatcgttgggatacaaaatcattaccagtaggattttgtgagtttccttgattcccatttggttgccattgaccttgattagatccatctgaagcatttgggttccatgtccccccatttttcgagccaccagaatgattggaatccccaggttgatcgggatctggtgacgggttaggatttggcttattagggtctggttttggattcggatttggctttggtttatctggatctggttttggatccggatttggcttattagggtctggttttggatctggatttggtttcgggttatctggatctggttttggatccggatttggctttggtttatctgggtctggttttggatccggttttggtttcgggttatctggatctggtttaggattcggacttgggttttggttatttgggtctggttttgaatctgtacttgggttttggttgtttgagtctggcttcacattattcgaatcaggattagcatcacgactattcgaacctgttccttcattacccgtttgatttgattcgtgaggtgtcccagtctcattattattcatttcactatttactgatggtgaagttatattatgattcaaattagtagttggtttttctccatttaagttatcctttgcttcaactgtgtgcgttgcaagccctaaactactactacttaaaattaaaatacttgttgaaagtaacattttcttaaaccaatgatatgacatttcacgagacacctccctttttcatgtaagtattaatctaagtataataaatatgcgttgaaaatgcatttatatttggaatttgaaaatgaatattaatattcttgaaattttcgtaaatattgctttacaagtacgagtataaattttatacttagtctattaagtattctttactaaagaaggagcaataattatgggcttatttaaaaaagataaaaaagcaatgacttttgacaatgcaatggaagaaagacgttcaatatataatttgaaagattcgatatcaattagcgatgacgaattagaatcaatgattgcacatgcagttaaacatgttccttcatcatttaattctcaatcaactagaattgttctcttgttaaatgacaacaataataaattttgggataacacaaaagcaattttaaaagaagtcatgggagagaatcgtgatttcgagccaactgaacaaaaaattgataacttcaaacattcatacggtacaattttgttttatgaagatcaagatgttgtaagtggtttacaagaacaaatgccaaactactatgataattttgcaatatggtcaactcaaacaaatgccatgcatcaatttgcaatttggactgcattagctactaaaggcataggtgcttcattacaacactataatccacttgttgatgagatgacttcaaatgaatttaatattcctaaaagttggaaacttattgctcaaatgccatttggtgatattcgtgaagctgctggcgaaaaaacatttaatccagtggaagatcgtttcgtaataaaaaaataatcaatatattgttaggaatgggacagaaatgataaagaatcattagttattcattatgtagtagttcttacacattagccgctgctaatgtgcacttaagaataggaatacatgagtaaaactcatgtataagaaatactaatttctaaagaaaaagtatttctttatgttagagcccaccccaacttgcattgtctgtagaaattggtgttccaatttctctatgttggggccccatcaactactgtcaatataactttgtagagcctaggactttgattttatgtcttgtgctcgttttttgcgtttcaacataacttttagtaagttatatataagatctatcaaggatgtgatgttatgaaagtccaaatttatcaattaccgattgtttttggagatagttctaaaaatgaaactcaaataacgcaatggttcgaaaaaaatatgaatgctgaagtagatgtagtcgttttacctgaaatgtggaataatggctatgatttagagcatttaaatgaaaaagcagataataatctaggacaaagtttttcatttattaaacatttagctgaaaaatataaagtcgatatcgtagctgggtcagtttctaacattagaaacaatcaaatatttaatacagcttttagtgtgaataaaagtggccagctgattaatgaatacgacaaagttcatttagttcctatgttaagagagcatgaatttttaaccgctggcgaatacgtagctgaaccctttcaattgtctgacggtacttatgtgacccaacttatctgttatgatttacgttttccagaattattaagatatcctgctcgtagtggtgctaaaattgcattttatgtggcgcaatggcctatgtcacgtcttcaacattggcattcattactaaaggcacgtgcaattgaaaataatatgtttgtcattggaactaatagcactggattcgatggtaacacagaatatgctggtcattcgatagttataaacccaaatggagatttagttggagaattaaatgaatccgcagatattttgactgtagatttaaacttaaatgaagtagaacagcaacgcgaaaatatacctgtatttaaaagtattaaattagatttgtataaataagaagcgcccgaaataatatttaacacatgtcatgactaaacatagatttatgagagatttttcataagtctatgtttatttttttataatagataactcagtaagaacccatttcgccctttgcaaatgaatgattttcttaattaaattgattaattttttgaccttttccaacattagacttattcatatattttaacggcgggtctcataatgatgattaactcatcccttcttcattacaaaaaaggccgcgagcttgggaggggctcacgaccatacttattattaagggaatgttttacagttattttttcaatctatttttggggatgttattaattatgaaaaaaattttatttatcaaataatgataaatcgatgttgtttacgatagcttacatgctagaaataattatctgtaatgataattaagaaaaatacatagcactgagtccaaggaaactaactctactagcaaatgttactcacttgctaattttacatggttattaagttgggatggcttaataactcatacttttagtactatacgaagataacaaatttacaatgaaagtaattaattattcatcttattttttagtgaatttgttcactgtgtcgataatccattttactaagtcaccgattgttgaaatgatatcttgtgccattgaaatcactccttccttaattaagataaaaattcttaaaattaaacaactcatcaactattttccatcacatctctgtgatctagttatattaaaacatgctaaaagcatttattttccaatttttcttaactagtcgttttttattcttaactgtaattttttttatgttaaaatattaaatacaaattacatttaacagttaagtatttatttcctacagttaggcaatataatgataaaagattgtactaaatcgtataatgacagtgaggagagtggtgtaaaattgaattattttgataataaaattgaccagtttgccacgtatcttcaaaagagaaataacttagatcatattcaatttttgcaagtacgattagggatgcaggtcttagctaaaaatataggtaaattaattgttatgtatactattgcctatattttaaacatttttctgtttacgttaattacgaatttaacattttatttaataagaagacatgcacatggtgcacatgcaccttcttctttttggtgttatgtagaaagtattatactatttatacttttacctttagtaatagtaaattttcatattaactttttaattatgattattttaacagttatttctttaggtgtaatctcagtatatgctcctgcagcaactaaaaagaagcccattcctgtgcgacttattaaacgaaaaaaatattatgcgattattgttagtttaacccttttcattatcacacttatcatcaaagagccatttgcccaattcattcaattaggcatcataatagaagctattacattattacctattttctttattaaggaggacttaaaatgaatacattatttaacttattttttgattttattactgggattttaaaaaacattggtaacatcgcagcttatagtacttgtgacttcataatggatgaagttgaagtaccaaaagaattaacacaattacacgaataatttaaatagagagtgtgatagtaggtggaattattaaatagttataattttgttttattcgtattaactcaaatgatattaatgtttacaataccagctataattagtggtattaagtacagtaaacttgattattttttcatcatagtaatttcgacattatcgttatttctatttaaaatgtttgatagcgcgtccttaatcatattaacttcatttattattataatgtattttgtcaaaatcaaatggtattctattttgttgattatgacttcgcagattattctatactgtgctaactacatgtatatagttatatatgcatatatcaccaaaatttctgatagtatatttgtaatattccctagcttttttgtagtttatgtgactattagtatactattctcatatataataaatagagttctcaaaaaaattagcacaccatatctaatactaaacaaaggatttttaatagttatttcgactatcttactgcttactttttcattatttttcttttattcacaaataaactcggatgaagctaaagtaataaggcagtattcttttatttttattggtatcactatatttttaagtatattaacatttgttatttctcaatttctccttaaagagatgaaatataaacgtaatcaagaagaaattgaaacctattatgaatatacattgaagattgaagctatcaacaacgaaatgcgcaagttccgtcatgattatgtcaatatcttaacgacactttcagaatacattcgagaagatgacatgcctggcctacgtgattatttcaataaaaatattgtacctatgaaagacaatttacaaatgaatgctataaaattaaatggtatcgagaatcttaaagtacgtgaaattaaaggcttaattactgcgaaaattttacgtgcacaagaaatgaattttccgattagtatcgaaatacccgatgaagtaagtagcattaacttgaatatgatcgatttaagtcgcagtattggtattattcttgataatgcaattgaggcatcaactgaaattgatgaccctatcattcgcgttgcatttattgaaagtgaaaattcagtaacgtttattgttatgaataaatgcgctgatgatataccacgcattcatgaattgttccaagaaagtttttctactaaaggtgaaggtcgtggtttaggtctatcaactttaaaagaaattgctgataatgcagacaatgtcttattagatacaattatcgaaaatggtttctttattcaaaaagttgaaattattaacaactagccataaggatgtgaatgtatgaaaattttcatttgcgaagacgatccaaaacaaagagaaaacatggttaccattattaaaaattatataatgatagaagaaaagcctatggaaattgccctcgcaactgataatccttatgaggtgcttgagcaagctaaaaatatgaatgacataggctgttactttttagatattcaactttcaactgatattaatggtatcaaattaggcagtgaaattcgtaagcatgacccagttggtaacattattttcgttacgagtcacagtgaacttacctatttaacatttgtctacaaagttgcagcgatggattttatttttaaagatgatccagctgaattaagaactcgaattatagactgtttagaaactgcacatacacgcttacaattgttgtctaaagataatagcgttgaaacgattgaattaaaacgtggcagtaattcagtgtatgttcaatatgatgatattatgttttttgaatcatcaacaaaatctcacagactcattgcccatttagataaccgtcaaattgaattttatggtaatttaaaagaactgagtcaattagatgatcgtttctttagatgtcataatagctttgtcgtcaatcgccataatattgaatctatagattcgaaagagcgaattgtctattttaaaaataaagaacactgctatgcatcggtgagaaacgttaaaaaaatataataagataataaagtcagttaacggcgtattcaattgtaaatcttgttggattttaacaagataactagcaaatgcactgtatagctggctttttaattttattaacaaaattaaatatgacgcgtgaattaaaaaatgatgtaacgtctctttgtatacctattcctattactacataatttatcaatttctatttcactctacaatcctatggcgcaatttttaacaaaatatactaaatttgaaattgacagtttccataaataaaatgctataatttcctactccgtgaatcttattttgttttaaaaaacagtgtagcacaagattcaacttgtttcctacactgttttataaatgaattatttaaaatgcttgttcaacctcttgtaatgttggcaaactattaatagcaccatacttcgttgtcactattgcagcaacgcgattgctaaacgctaaaatttcctcaccttcattttcaaataactgagttaaatttaacacatcggttgctaaaatcctgctaataactgcaccaataaatgcatcccctgccccagttgtatcaacaggttttaccttatagccactatgataatgattaataccatttttcaaatatacggcagcaccatctgctcccttcgtataaatgactacagtaacattacctgtaaataatgattgaatggcttcattttcatcatgaatacctgtaataaattctaattcttcatctgaaacttttacaatatgcgccaatggcaaaaaggtatgaatagtttgtcttaaatcttcagcgttatcccataatggcaatcttacattaggatcaaatacgacagtaccatttgcatttaatgttttggtaatcaattgataatgtgcatctctcatcggactatcgaccaaatcaacagaacaaaaatgtactacatcattttcattcacatcaatatcattcacaaaacttggttcaaataacatatcagcagagggcttacgataaaaagaaaaatctcgctcgcccgcttcagtcaaactcacaaaagctaacgcagtgtttgcttcattcgtgcgatacacttttgatacatctacaccaatacttgatatcgtttcaataatgctatctccaaatgcatcattacctaattgtgtaatcatatacgcttgttgtcctaacttttgaactgtacaagctacattgcatggcgcgccaccaatttgcttcgtaaatgtttgaacatcttttaaattcgcatttgtaacatttggaataaaatcaattaacgcttctcctattgaaaatagacgtctcatttatgttcatcctttaaatcatatttagtaaattgtaaatatacttgccctgattctgttgatgttttaatacctagtgcgtcttctgtcgggaaaattcgagatgtcaaaacacgttctccatcattacagaaaatttctatactagatgtatcaacaaaaatttgtaattgctttaatggcgtgtctaatatcgtactacgcgtcgtaccttcaacatttgtcggcaataaaccactgtcgctgcgatctaatgttattttattttcacgcttgttataagcaattaatgttgaagaagtcttagatgtacgtaattcaaagtacacttcggtagcatcattatccaaaatatctatgattaattcatactgtttaccttcatacggatgtaattttcgagtaaatttatttgcgtagcctaatgctgtctctttattgtgacgtaatttttccaacgctggatatggacgttgcttaagttgaccattttctacatttaatacacgaggaattgttaagcaatgggcccatccttcattatcagtaggatattcgatttccggtaaccccatccatccaattagtactcgtcggcctttttcatctaaaaatgtttgaggtgcatagaaatcaaaaccattatcaagctcgacaaaattttcatgttcatatgttaacttttcaatatcaaactttccaagtatataaccactttgataaatatttttgaactgatcgccttttggttcaataccttgtggacaaataagtatgacatcttgattatctacattaaagtaatctgggcattcccacatatatccaaaatcatccaactctgtatttatttcacctaaataatgccaattaattatatcttcagtattataaagtaataatcgaccttgctgatcattattttgtgcaccaatgattgcataatatttctcatcatatttaaaaactttaggatctctaaaatgactcgtatatccttctggttgttggctaattactggctttggaaacttttcaactgaaccgtcttctttcaatcgtgcgatcatctgactcgcatgtcgttgccaatgattatctcgatgatttcctgtgtacatataatataaatgcccgttatattcaaaagcgctaccgctatatacaccatggctgtcatatttagtatctggatttaaaattggcccttcagctttaaagtttattaagtcatcactcgtgtagttataccaatactttaagccatgtactgcgcctaatgggaaccattgatgtgaaacataatacttccctttataaaaaataagtccgttggggtcatttaataagcctgtttctggttgtatatgaaattgttgacgaaattttgattgatcaacttgttgttttaatgttttaaaatactcagtatcaacgtcctcgattcgttgataacgttcttctctagtccattcggtcataatatttacccagtcctccttttataatttatgctaataacaatttatattctattatagcaaattttacctacgttctttaacttttaacctatccatttatagttatatggtatcggttccacatttattttaaaaaatacagcgtctaaatattaacatctactgtgacgctatatggcatatcttgctttttaagcatctgttgtatctcttccatcgcgcattggccagcttcaaaataattataatgaattgtttttatcgatggagacactaattgtgtcattgggtcaccaccaaaaccatatatttgatgtggtttcataacatcttttttatcagaataatatttataggcagctaatgcaatcgtatcagttgctccaacaaccgcatctacttgctccacattttccaaaacatttgcaacatctttttgtgcttccacataagtaaaatttgtttcatgtatattaggtttaatttggtatttagctaactggtcaagtaaaccacgttttctatgtataccaactgcaatatctttttcacttacactaaacacttcaacttgttgatatccctgttgaccaatccattcgcctataatttgacctgctttataatcatcatgcacaatactatgaagttgttcatgttgttgaccaacaataacgattggtacattcattttattaatgacttcaatatgtctctctgttatgtctgtagccattaaaacaataccatctactttactgcgtgctaatgtttcaagcgcttgtatttctgcttcgatatttaaacctgtgtaatttaaaattaattgtgattcatatttttggcattgttttgccaatcctttgattgtttcatctactgcatatgaattcattctaggtataatggcaccaataaggtgtgtttgtctcgctcttaaactttgagcaaattgattcggttgatagtcatgttctgctataattcttgttaatttttcacttgtttttttactgacagatccattatttaaaaatctagatactgtactttttgaaacgcctgccaatttggcaatatcagatatatttttcatacttattcacctatcattatttgtgacacttagccttattttagcatatgtgtaaccgctttaaataatatttctgcttctttcataaaaagatttcaaaataaaacttttgtataacaaaatgtcccaacatcaacctttagttaaatgtcaggacaatgaatattctatgtaaatatattctaatatcgaatatgtttattgaatctatttagctcaccttcaaagtaagcatgttcaccgtgaacaatcttgtctaatcctatattcgtttcttgttccgtaacagataatggtgtaattaatttaattactttcgcaataataaacgtcatgactatactaaaaattacaactgctgttacacataatatttgtacaagtataatatgtatgtcaccagtataaataaagccattctcaatgtcaggattggcttttttactttggaaaactgctgttaaaacagcaccaataataccaccaacaccatgaataccaaatgcatctaatgcatcatgatattttagttttaccttgatgtaattaatgacaatataacaacagatacctcctattaaagccattattgttgcactaagatatgttacatatcctgctgcaggagtaatgacaactaatcctgctaatgcaccgagtaaaagtccaagtaaacttgtcgtctttttaaaaatatattctaaaattaaccaacctatagcacctgcactggctgaaatgacagtatttgtaaatgcaagcatcgcaatattatcaaatgtaaaagcactacctacattaaatccataccaaccaatccacacgaatataccgccaatcaacgtaatgataagattatgtggtgttgattcagaatgtttgtttccttttccaatcataatagctaatactaaaccagaaacacctgatgtaatatgaacaaccgtacctccagcgaaatctaatacaccgagtttgttaatccaaccgccgccccaaacccaatgtgctactggactgtatacaagagcagtccatattactacgaataataaataaggaataaacttcattttctcagcgattgaaccagataaaatagaaattgcaatcgtacaaaacatcatttgaaataacataaacaaagcgaaaggaatatgtgggctaatatcttcttgagtcgcaaaacctacatgattaagaaaagtatattcccaatttccgaaccataaattcccattcccaaaactaattgtaaaaccaactgttatccatacaaatgtaacaagcacaattgctgccatactttgcatgacagtattaagcgcatttttagattgaactaacccaccataaaataaacttaatcctggtgtcattaaccaaactaataatgtacacaaaaacataaatatcgtatcgttaagattcatacttaccactccctttttttcataataatctgacaatttataaaaagcaaaaatgcgttaagttttattacatcttttggaataaaatgtgccacactatataaaaatgatttcatgaactaaaacaaaaaagactacttactcacttttaaattagcggaagtagccatagaatctaatatctattttattgttaaaatgataacgttaaactttttgaattgtaattgtccatgaagcattatcaatttgttcatagtttgttacaggataaccattttctgcagcccaatttggaatggcttccgtcgcttgcgtgcaatcaaaatcaatttttaattcatctccagattgcaatgttgccattttcttttgcgcttcaattaacggaaatggacataccattcctactgtacctaattcgtgtatcataattatttctccttttccaatcacttttatttgatcaacatcatttgcataataatcttctatactatttgcgtttgctgtttaacctttgcagattgttggtgtacttttttcattggacgaacaaagataaaatgactcattgtccatacaccaactatcatcgatgctagcgcaatccatccttgccaagtcatcgttgccgtttcaaccaaaccgttaccgatagaacaaccaccagcaactgacgcaccaaatcccatacatatgccaccaatggcactgtttcgtattgtaatcttgtctggcaatcgccatttaaattctcttgatcctctagctgcaatatatgaaccaatgaaaattcctagaactaaaaagacaccccaatcaataaatttagtttcacctgtaatcaaaaagtgtactaaatttgctgaaggcgttgttatacctaaaccgtcatttcttccagttgatgcactcattggccaagctaagagtgcgataagtccaattacaattgctgcaataaatggatggtatcgtttttcgaaaaggtaatatctaatacctgtataacgttgctttagttttggaacagcaactcgaactttcttattattgagtgttcttacaactagaaaaatggtgattatagttaatataacgactaatccccaaaacggaatgccagttgtttgagacatatcactatttacattcgttggttgattaattttatccattactggctttaaaatccctgttttagtgattgctgcagtaacagcatataatactaatgcaatccaactaccaattagcccttcaccagcgcgataccaagtacctgttgcacatcctccagccaatactattccaattccaaaaataaaagaacctataattgttcccaatattggaaaactatgtgcaggaatttgtaaaatatctgttgccgtcaaaatcaataatcctatactttgaatagtaatagcgattaataatgcatagaacatcttattattcttttgcacatacatatctcgaaagccacctgttaaacaaaatcttgttctttgcatgacaaaacctaagagtcccccgacaattaagccactaaaaatcatccacataatcttaacctctcatttccgataagtttagtatgtattataggtgatgattttcttgttttcaaccttatacacaatatttttgatatttatattatattcatataaggaaggcgattaattacgattcatcattatatctctacgtgttaatttattaacctatactatatttatcaacacaacagtttttcctttcattttcaaacataacagaaaaagcctgagacatacttagtcccagactgttctataattaattaaagatataacaaggttaatcattcaaagctaacatcacatttattcactgtaatttttcataaagaataataatgactgtaattctatacctaagtcaatttgatgtacttgcacatctgaaggcgtattaattctaccaggagtgaagtttaaaatacctttcacaccagcttggacgagttcatctgcaactttctgtgcaactctttctggtgtagttagaatcacaacatctatttcttccttcttcaatgttgttattaattcatcgttatctttaacaataacgttccctattttctggccaataacatcttcttttacgtcaaacgcttctgtaatcgtcatatcgtcatgtattgaaaagttatatgtgagcaaagctttccctaggttcccaactccgacaattgcgattttgatcatgtcactctcgcttagttcagatttaaagaaatccaataaactatctatattatatccgtacccttttttacctaattcgccaaaatatgaaaagtcacgacgaattgttgccgagtcaatttgtaacgcatcgctaatcgcttttgaatttacacgatctatacctttagattttaatgaactgacaaatctataatataacggcaaacgttttaaagttgctcgaggaattttaacttggtcactcattcgctatttcctccttcgtgtttgaatgaattatatctatgtattcaaacgagttagagcgtaattgttagattattaaaaaacaaataattgattacaatgaatacctaaatattatacattattgaattttaaaaataaatatcttagtttcaagacggcgttttatactgtaaaatggttattaatgtaataattacgacttttttcataagttaataaaatttgagaaagacgaaaggtgaagatcgaatgatacttttacaactcaatcatatatcaaaatcgttcgatggtgaagatatatttactgatgttgattttgaagtaaaaactggtgaacgaattggtatcgtaggaagaaatggcgccggtaaatcaacattgatgaaaattatagctggcgtagaaaactatgattctggaaatgtgtcaaaaattaaaaacttaaaactaggttatttaactcaacaaatgactttaaattctaatgcaacagtttttgaagaaatgtcaaaaccatttgaacatattaaacgaatggaaagcttaatcaaagaagaaacagattgtttatcaaaacatgcaaatgattacgatagtgatacatataaaacacatatgtcccgttatgaatctttatcgaatcaatttgaacaattagaaggatatcaatatgaaagtaaaattaaaacagtactttacgggttaaattttagtgaagaagatttcaataaacctatcaatgattttagcggtggccaaaaaacacgtttatctttagctcaaatgctattaaacgaacctgatttattacttttagatgaacctactaaccacttagatttagaaacgacaaagtggcttgaagattatctacgttattttaaaggtgcaatcgtcatcatcagccatgatcgttactttttagataaaatagttactcaaatttatgatgtggctttaggtgatgtcaaacgctatgttggtaattacgaggaatttatacagcaacgggatttatattatcaaaaacgaatgcaagaatatgaaagtcaacaagcagaaataaaacgattagaaacttttgttgagaaaaatattacccgtgcttcaacaagtggaatggcaaaaagtagacgtaagattttagaaaaaatggaacgcattgataaaccaatgttagatgccaaaagtgcaaatattcaatttggctttgaccggaatacaggtaatgacgtcatgcatgtaaaaaatttagaaatcggttatcaaactgcaattaccaaacctatgagtatagaggtctctaaaggcgatcatatagcaatcattgggccaaatggtattggaaaatcgaccttaattaaaactattgctaatcaacaaaaagcgcttaatggcgatattactttcggcgcaaatttacaaattggttattatgatcaaaagcaagcagaatttaaatctagtaaaacgattttagattatgtgtgggatcaatatccgttaatgaatgaaaaagatattcgagcagttcttggacgtttcttatttgtacaagacgatgttaaaaagataattaatgatttatctggtggtgaaaaagcacgtttactactagcactacttatgttgcaacgtgacaatgtacttattttagatgaacctaccaaccacctcgatatagattcaaaagaaatgttagagcaagcactccaacattttgaaggaacaatactatttgtttcccatgatcgttactttattaaccaattagcaaacaaggtatttgatttaacaattgatggcggaaagatgtatttaggagattatcaatattacattgaaaaagttgaggaagcggaagcgttgaaagcgcaccaagaagaacagtcagttaacgtacaagcacataaaaagtctatggaacaatcgtcgtatcataaccaaaaagaacaaagacgtgaacaacgcaaacttgaacgacaaatatccgagtgtgaaaatgaaatagaaactttagagactactatcttacaaatagacgagcaattaacccaaccagaagtgtataacaatccacaaaaagcaaacgaattagctatccaaaaacaagatagcgaacaaaaattagaacacgctatgtctaaatgggaagaattacaacaaaaactataaaaatatacataactctaactgtaaaatcgctatagttagagttatttttttacaaattttaatttttttattcacaataaaaacgctgatattatagctatccacagacttatcctagttacccacaagtaaattaacactaatcaatcatttattttctgttttcccacctgatatccacaataaatgacgttatcaacaccttttatccacaagttattcactctttgttgataagtacgcatgttctctattgacattgtttttatcaaaattcattgttaagacattttctttatgaaataataataatattgaagtatatttttattattattaaaaataaataaggggatacttatgagcacaaatcaaacatttttaatatttgttatagcaattattctacttacatctgtaataggaattgttggacgatacatgagtcgtcaacgtctattaaaatctatggaaacattatggcaaacgatttctccattagaagcttttatcagaccgaactcacatttcgactatgagtataagctctacaaggaaaaatttgaatcacattcattagttgatgataaaacttggtccgacttaaatatgaatgcaatctttcataagatgaattataatttaacagctattggtgaaatgaagctatatgcctgtttacgtggaatgctttcaattacgaacaaatcattacttagtttatttaatgataatgctgaatttagaaaaaacgtaacatatcatttagctttgattggtaaaactgtttatccaacatttccagaccaaatcacaccggtaaaacgtcaaaatatattgtttctatgcccgtttttaccagttatctcatttgcagttatatttattaattcacaagttggtattttattatttcttatgagttgcctatttaatatcattttatcagcaactttaaagcgtacatatgaggatgacttaaaatctatcttttatgcatccaatgttttaaaacaaggctatactatctcaaaaattaaacatgctccacaacctgaagtcaattttaagcaatttagaacagcacgtcatttaacgagtgttttagctgaagttaatgatgaagatatcggagctatggtaattaaactagttaaacttattttcatgcttgattatgttttatttcattcaattcaaaaaagctatacaacacatatgaatgagcttaaaaattgtttcgattacatagctgaattagataatcattatgcattagcaatgtatcgtagaacgctagaatgttatactgaaccacaaattgatgattcaaatgatggcatagtattctctgagttaacacatccactcatagcagatgcagtagccaatgatttctcactatcacaaaatatactgttaactgggtctaatgcttcgggtaaatcaacatttatgaaatccatagcaataaacattattcttgcatcggctatacaaacagttaccgcaagcaaatttgtatatcaacctggaattgtgttcacgtcaatggcaaatgccgatgatgtgttatcaggcgatagttattttatggctgaattaaaatctattaagcgtattgttgaaattccagataatcaaaaaatatactgctttatagatgaaatttttaaaggtaccaacacaactgaacgaattgccgcttcagaatcagtactatcatttttacatgaaaaatctaactttagagttattgcagcaacacatgatattgagttagctgaactcttaaaacaacgttatgaaaattaccatttcaatgaggtaatagaaaataataacatacattttgattacaaaattaagcctggcaaagcaaatacacgtaatgccatcgaattattaaaaatcacttcatttccagcaaaaatatatgaacgagcaaaagataatgtcccgaaaatttagcatttaactttaaacataaaaacgtcagctatcacatgacagaagactatgaacagtttcaataatgttcatagtaatcatgttaataactgacgtttattttattctgcagaatactcttctaaatctatattgctgtgcccatttaatgctaaatcagcaaatcgaccttgctgatacaaatagtggccggcaacgcctatcattgcagcattatctgtgcataatttaggacttgggatagttaattgaatgtcattgactttgcattgatccgctaaagattgacgtaatcctttattactcgccacgccaccagcaacaattaatcgctgaacaccatattctttacaagcttgaatagctttaaacgtgagcacctctacaacactgttttgaaagctcgttgctacgttagcttcaatgattggaatatttttttgtcgttgattgtgaagttgattgattacggcacttttcaacccactaaaactaaaatcataactatctttatccaaccaaacacgagggaatgaataagtatcttcaccttcagcagccaaccgatcaacttgtggaccacctggataatttaaaccaattgttcgtgccactttatcataagcctcacctactgcgtcatctcgtgtttcaccaatgacttcaaatgataaatgatccttcatataaactaattcagtatgtccacctgaaacaataagtgcaattagcgggaatgttaatggctcttctatgtgattagcatatatatgtcctgcaatatgatgaacaggaataagtggcttatcgtaagcaaatgccaatgctttggctgcattaacacctattagtaacgcaccaattagtccagggccttctgtaaccgctatggcatcaatatcttctattgatacatcggcatcccctagagcctcgtttattgttgctgttataccttcaacgtgatgtctacttgccacttcgggaacgacaccgccaaatcgtttatgactttcaatctgacttaaaactgtatttgataaaatatctctgccattttttataacactaacgcttgtttcatcacaacttgtttcaacagctagtattaatatatctttagtcatttaaattcacccacataaccattgcgtcctcaccttcaccataataatttttacgtttaccaccatattgaaatcctaaattttcatatacatgttgtgccactttattattaactcttacttctaaactcatcacatcacaagtgtgacttgcatagtttattccgtattttaaaagcatttgacctaaaccatagcctctataattatcatcgattgcaactgttgtaatttgagcttgatcgataacaatccataaacctaaataaccaataatttgttgttcaaattctaagacaaaatatttcgcaaagttattttgctctatttcatgataaaatgcgtcaattgtccaagaactgtcattgaaactccgacgctcaagatcaaagacttgtggcacatcttctttagtcatctctctaatgtttaattgttcttttgactgttgatccaatttcgttccgcctcagctaatttatggtatttaggagtaaatgtatgtacgtctgaaggtttatctagcaattgatacatgactgatgcatttggtagctgcgcaatcacttcaccttgtaattcatcttgtaattttacagtatctttcccaatataaataaatggttggtttaaatcttctaaaaaagctcgcaatgcctctatcgacatatattgatcttctaaaatagtcactaattgaccattttgccactggaatatgcctgtataaactgcttgtcgtcttgcatcaaacacaggaaccaataatttatcagtatgatcgattgttgctgccaatgcctttaatgatgaaacaccatataatttaacatctaacgcatacgctaatgttttagcaacagtaacaccgatacgtaagccagtatatgaaccaggaccttcagcaacaataatcgcatctaattgctgtttagctattttgctctgctcaaatagctgactaatcgcaggcattaattgcactgaatgattttgtttagaatccgtagttatttcagctaaaacttcatcgttttgcatcaatgctactgataatggttgattcgatgtatcaatgagcagcgaattcatggataattgcctccttaatttgttcataatgttctccttgcgcgaacaactcaatttgtcttgtattttcagatattgttgaaatgttaatagataaatgcgtcgctggaagtaaatcttttataaattgactccattcaataacagtaattgcctgatcttcgaaaaattcatcaaatcctaaatcttcatcagaatcttctaagcgataacaatccatatgatgcaattttaaatttttacccctatatgatttaatgatgttaaatgtcggggaattaatcgtacgtcttacaccaagagcttttcctataaattgcgttaacgttgttttacctgctcctaaatctccgttaagtaaaatcaaatcaccacttttcaattgctcaactaaaaatatagcaaattgattcatttcatctaaattatttatctttatcaatgttgattctcctatattatgcttttcattcataaaaatgattatccattgttcaatcgtatctaactttatatttaacctttatattgtaacaaatttcaacttaaatttcttatctttgaaacagattatctattcaaagttaattgtaagaaaatttaaaatatttgttgacatactaaagcagatatagtaaattaaatttatcaaatttttagacaattctaactattaaagtgatatataccattcacggaaggagtataataaaatgcttaatcaatatactgaacatcaaccgacaacttcaaatattattattttattatactctttaggactcgaacgttagtaaatatttactaaacgctttaagtcctatttctgtttgaatgggacttgtaaacgtcccaataatattgggacgtttttttatgttttatctttcaattacttatttttattactataaaacatgattaatcattaaaatttacgggggaatttactatgcgaagcgacatgatcaaaaaaggagatcaccaagcaccagcaagaagtcttttacatgccacgggcgcgctaaaaagtccaactgatatgaacaaaccatttgtagctatttgtaactcttatattgatattgttcctggacatgttcacttgagagagcttgcagatatagctaaagaagcaattagagaagccggtgccattccatttgaattcaatacaattggtgttgatgatggaatagctatgggacatatcggaatgcgatattctctaccatcacgtgaaattattgcagatgcagctgaaactgtaattaacgctcattggtttgacggcgtattttacattcctaattgtgacaagattacacccggtatgattttagcagccatgaggacaaacgtaccagctatcttttgctctggtggaccaatgaaagctggcttatctgcacatggaaaagcattaacactttcatcaatgtttgaagcagtcggcgcatttaaagaaggatcgatttctaaagaagaatttttagatatggaacaaaatgcctgccctacttgtggttcatgtgctgggatgtttactgcaaattcaatgaactgtttgatggaagttttaggtctaacattaccatacaacggtactgcacttgcagtcagtgatcagcgacgagaaatgattcgccaagcagcttttaaattagttgaaaatattaaaaatgatttaaaaccacgtgatatcgttactcgcgaagcaattgatgatgcatttgcacttgatatggctatgggtggttcaacaaacacggtactgcatacgttagccattgccaatgaagctggtattgattatgacttagagcgcattaatgctattgccaaacgcacgccatatttatcaaaaatagcacctagttcatcgtattcaatgcatgatgtgcatgaagctggtggcgtcccagcaattattaatgaattgatgaagaaagatggcacgttacacccagatagaatcacagttactggcaaaacgttacgtgaaaataacgaaggcaaagaaattaagaactttgatgtcattcaccctcttgatgcaccatatgatgcacaaggcggtttatctatcttatttggtaatatcgcccctaaaggcgcagttattaaagttggcggcgttgatccatctatcaaaacatttactgggaaagcaatttgtttcaattcgcatgatgaagctgttgaagcaatagacaatcgtaccgttcgtgcaggccacgtcgttgtcattagatatgaaggacctaaaggtggaccaggtatgcctgaaatgttagcacctacttcctctattgttggtcgcggcttaggtaaagatgttgcattaattactgatgggcgtttttccggtgccacaagaggtattgcagttggtcatatttcccctgaagctgcatctggtggaccaattgccttaattgaagatggtgatgagattactattgatttaacaaatcgtacattaaacgtaaaccagcctgaagatgttctagcgcgtcgccgagaatctttaacaccatttaaagcgaaagtaaaaacaggttatctagctcgttatactgccctagtaactagcgcaaatacaggtggcgtcatgcaagtccctgagaatttaatttaatttatttttatattggagatggttaaaatgtctaaaactcaacatgaagtaaaccaaaatattgaccctttaaaaatggctgaatcacttgaacctgaacaactaaatgaaaaaactttaaatgatatgcgttcaggatcagaagtgctagtagaagctctacttaaagaaaatgtggattatttattcggttatcctggtggtgccgtactacctttatatgacacgttttatgatggtaaaatcaaacatattttagcaagacacgaacaaggtgctgttcatgctgcagaaggttatgcacgtgtatctggtaaaactggcgtcgttgtagttacaagcggtccaggtgcaactaatgtaatgacaggtattacggatgcacattgcgactctttacctctagttgtattcactggacaagttgctacaccaggcattggtaaagatgcattccaagaagcggatattctatctatgacttcaccaattacaaaacaaaattatcaagtgaaacgtgttgaagatatccctaaaatcgtacacgaagctttccatgtagctaattctggacgcaaaggtcctgtagtgattgattttccaaaagatatgggtgttttagctacaaatgtggatttatgcgacgaaatcaatattccaggttatgaagttgttacagaaccagaaaataaagacattgacactttcatctcacttttaaaagaagcgaaaaagcctgtcgtattagccggcgcaggtattaatcaatcaaaatcaaatcaattattaacacagtttgttaataaacatcaaatcccaacagttactactttactaggtctaggtgctgtaccttatgaggatacactatttttaggtatgggaggaatgcatggttcttatgctagtaacatggcattaactgagtgtgatttactcattaatttaggtagccgcttcgatgatagattagcaagcaaacctgatgcctttgcacctaacgccaaaattgtacatgtagatattgatccttcagaaatcaataaagttattcatgtagatttaggtattattgcagactgtaaaagatttttagaatgtttaaatgataaaaatgttgagactatagaacacagtgactgggttaaacattgtcaaaataataagcagaaacacccatttaaacttggtgaagaagatcaagtattttgtaagccacaacaaacaatcgaatatatcggcaaaattacaaatggtgaagcaattgttactacagacgtgggacaacatcaaatgtgggcagctcaattttatccatttaaaaatcacggacaatgggttacaagcggtggtttaggaacaatgggattcggtattccttcgtcaattggtgccaaattagctaatcctgataaaacagtcgtatgtttcgtcggtgacggtggtttccaaatgacaaaccaagaaatggcacttttacccgaatatggtttagatgtcaaaatcgtactaatcaataatggaacattaggtatggttaaacaatggcaagataagttctttaatcaacgcttctcacactcagtatttaatggtcaacctgattttatgaaaatggcagaagcatatggcgtcaaaggtttcttaatcgataagccagaacaactggaagaacaattagatgcagcgtttgcttatcaaggaccagctttaattgaggttcgtatttcccctactgaagctgtaaccccaatggttccgagtggcaaatcaaatcatgaaatggagggcttataatgacaagaattcttaaattacaagttgcggatcaagtcagcacgctaaatcgaattacaagtgcttttgttcgcctacaatataatatcgatacattacatgttacacattctgaacaacctgggatttctaacatggaaattcaagtcgatattcaagatgatacatcacttcatatattaattaaaaaattaaaacaacaaattaatgttttaacggttgaatgctacgaccttgttgataacgaagcttaattttaagacaaaggcaatgatgcgctaattagttatagatatatcataggctgctagttaacatctgccactattacaaagttatatttcagaattttcgaaacacaaaatatttaattatttggaggaatttattatgacaacagtttattatgatcaagatgtaaaaacggacgctttacaaggcaaaaaaattgcagtagtaggttatggatcacaaggtcacgcgcatgcacaaaacttaaaagacaatggatatgatgtagtcatcggcattcgcccaggtcgttcttttgacaaagctaaagaagatggatttgatgtgttccctgttgcagaagcagttaagcaagctgatgtaattatggtgctattacctgatgaaattcaaggtgatgtatacaaaaacgaaattgaaccaaatttagaaaaacataatgcgcttgcatttgctcatggctttaacattcattttggtgttattcaaccaccagctgatgttgatgtatttttagtagctcctaaaggaccgggtcatttagttagacgtacatttgttgaaggttctgctgtaccatcactatttggtattcaacaaggcgcttcaggtcaagcacgtaatattgctttaagttatgcaaaaggtattggtgcaactcgtgcaggtgttattgaaacaacatttaaagaagaaactgagacagatttatttggtgaacaagcagtactttgcggtggtgtatcgaaattaattcaaagtggctttgaaacattagtagaagcgggttatcaaccagaattagcttattttgaagtattacatgaaatgaaattaatcgttgatttgatgtatgaaggcggtatggaaaatgtacgttactcaatttcaaatactgctgaatttggtgactatgtttcaggaccacgtgttatcacaccagatgttaaagaaaatatgaaagctgtattaactgatatccaaaatggtaacttcagtaatcgctttatcgaagacaataaaaatggattcaaagaattttataaattacgcgaagaacaacatggtcatcaaattgaaaaagttggtcgtgaattacgcgaaatgatgccttttattaaatctaaaagcattgaaaaataagatagacctacaatgaggagttgttaaatatgagtagtcatattcaaatttttgatacgacactaagagacggtgaacaaacaccaggagtgaattttacttttgatgaacgcttgcgtattgcattgcaattagaaaaatggggtgtagatgttattgaagctggatttcctgcttcaagtacaggtagctttaaatctgttcaagcaattgcacaaacattaacaacaacggctgtatgtggtttagctagatgtaaaaaatctgacatcgatgctgtatatgaagcaacaaaagatgcagcgaagccggtcgtgcatgtttttatagcaacatcacctattcatcttgaacataaacttaaaatgtctcaagaagacgttttagcatctattaaagaacatgtcacatacgcgaaacaattatttgacgttgttcaattttcacctgaagatgcaacgcgtactgaattaccattcttagtgaaatgtgtacaaactgccgttgacgctggagctacagttattaatattcctgatacagtcggctacagttaccatgatgaatatgcacatattttcaaaaccttaacagaatctgtaacatcttcaaatgaaattatttatagtgctcattgccatgacgatttaggaatggctgtttcaaatagtttagctgcaattgaaggcggtgcgagacgaattgaaggcactgtaaatggtattggtgaacgagcaggtaatgcagcacttgaagaagtcgcgcttgcactatacgttcgaaatgatcattatggtgctcaaactgctcttaatctcgaagaaactaaaaaaacatcggatttaatttcaagatatgcaggtattcgagtgcctagaaataaagcaattgttggccaaaatgcatttagtcatgaatcaggtattcaccaagatggcgtattaaaacatcgtgaaacatatgaaattatgacacctcaacttgttggtgtaagcacgactgaacttccattaggaaaattatctggtaaacacgccttctcagagaagttaaaagcattaggttatgacattgataaagaagcgcaaatagatttatttaaacaattcaaggccattgcggacaaaaagaaatctgtttcagatagagatattcatgcgattattcaaggttctgagcatgagcatcaagcactttataaattggaaacactgcaactacaatatgtctctagcggccttcaaagtgctgttgttgttgttaaagataaagagggtcatatttaccaggattcaagtattggtactggttcaatcgtagcaatttacaatgcagttgatcgtattttccagaaagaaacagaattaattgattatcgtattaattctgtcactgaaggtactgatgcccaagcagaagtacatgtaaatttattgattgaaggtaagactgtcaatggctttggtattgatcatgatattttacaagcctcttgtaaagcatacgtagaagcacatgctaaatttgcagctgaaaatgttgagaaggtaggtaattaattatgacttataacattgttgccctacctggtgatggaatcggtccagaaattttgaacggatctctatcattgcttgaaattataagtaataaatataactttaattatcaaatagagcaccacgaatttggtggtgcctctattgatacattcggcgagcctttaactgagaaaaccttaaatgcgtgtaaaagagcagatgctattttactgggtgcaatcggtggacctaaatggacagatcctaacaatcgaccagaacaaggattattaaaattgcgtaaatccttaaatttatttgtaaatatacgccccactaccgttgtcaaaggcgctagttctttatcacctttaaaggaagaacgcgttgaaggcacagatttagttatagtccgtgaattgacaagtggtatttattttggagaacctagacattttaataatcacgaggccttagattctcttacttatacaagagaagaaatagaacgcattgttcacgtagcatttaaattggccgcttcaagacgaggaaaactaacatcagttgataaagaaaatgtattagcttctagtaaattgtggcgcaaagtcgtaaatgaagtaagtcaattatatccagaagtaacagtaaatcacttacttgttgatgcttgtagtatgcatttaatcacaaatccaaaacaatttgacgtcatcgtatgtgaaaacttatttggcgatattttaagtgatgaagcttcagtgattcctggttcacttggtttatcaccttctgctagttttagtaacgatggtccaagattgtatgagcctattcatggatcagcaccagatattgcaggtaaaaacgttgccaatccatttggaatgattctatctttagcgatgtgtttacgtgaaagcttaaatcaaccagatgctgcagatgaattagaacaacatatttatagcatgattgaacatgggcaaacgacagcagatttaggcggcaaattgaatactactgatattttcgaaattctatctcaaaaattgaatcactaagggggagatgtaaatgggtcaaacattatttgacaaggtgtggaacagacatgtgttatacgggaaattgggcgaaccgcaactattatacattgatttacaccttatacatgaagttacttctcctcaagcatttgaaggacttaggcttcaaaacagaaaattaagacgcccagatttaacatttgcaacactcgatcacaatgttcctactattgatatattcaatattaaagatgaaattgcaaacaaacaaatcacaacattacaaaaaaacgccatagattttggggtgcatatttttgatatgggttctgatgaacaaggtattgttcacatggtaggacctgagacaggacttacacagcctggcaagacaatcgtttgtggtgactctcacacagcaacacatggagcatttggtgctattgcatttggaattggaacaagtgaagttgaacatgttttcgcaactcaaacgctatggcaaacaaaacccaaaaacttaaaaatcgatattaatggtaccttaccaacaggcgtctatgctaaggacattattctgcatttaattaaaacgtatggtgttgactttggtacaggctatgctttggaatttactggcgaaacaattaaaaacctttcaatggatggtcgaatgactatttgtaacatggctatcgaaggtggtgccaaatacggcataatccaacctgatgatataacatttgaatatgttaaagggagaccatttgccgataacttcgctaaatcagttgataagtggcgtgagctatattctgatgacgacgcgatatttgatcgtgtaattgaacttgatgtttcaacattagaaccacaagtgacatggggaactaatcctgaaatgggtgttaatttcagtgaaccattccctgaaatcaatgatatcaacgatcaacgtgcgtatgattatatggggttagaaccaggtcaaaaagctgaagacatcgacttagggtatgtttttctcggttcatgtacaaatgctagactatcagatttgattgaagctagtcatattgttaaaggaaataaagttcatccaaatattacagctattgtcgtaccaggttctcgtacagtaaaaaaagaagcagaaaaattaggtctagatactatctttaaaaatgcaggatttgaatggcgtgaaccaggatgttcaatgtgtttaggcatgaatcctgaccaagtacctgagggcgtacattgtgcatctacaagtaatcgaaactttgaaggacgacaaggcaaaggtgcaagaacacatttagtatcccctgctatggcagcagcagcagctattcatggtaaatttgtggacgtaagaaaggtggttgtttaaatggcagcaatcaaacctattacaacatataaaggtaaaatagtccctctcttcaacgacaatatcgatacagaccaaatcattcctaaggtacacttaaagcgtatttcaaaaagtggctttggtccatttgcttttgatgaatggcggtacttacctgatggttcagataatcctgatttcaatcctaacaaaccacaatataaaggggcttctattttaattactggagataattttggatgtggttcaagtcgtgaacatgctgcttgggctcttaaggactatggttttcatattattattgcaggaagtttcagtgacatattttatatgaattgcactaaaaatgcgatgttgcctatcgttttagaaaaaagtgcccgtgaacatcttgcacaatatgttgaaattgaggtcgatttaccaaatcaaactgtgtcatcaccagacaagcgtttccattttgaaattgatgaaacttggaagaataaacttgtaaatggcttagatgacattgcaatcaccctacaatatgaatcattaatagaaaaatatgaaaaatcactttaagggagttgaatattatgacagtcaaaacaacagtttctacgaaagatatcgatgaggcatttttaagacttaaagatattgtcaaagaaacacctttacaattagaccattacttatctcaaaagtatgattgtaaagtctatttaaaacgagaagatttacaatgggtacgttcttttaaattaagaggtgcttacaacgctatttctgttttatcagatgaagctaaaagtaaaggtattacatgtgcaagtgcaggtaatcatgctcaaggtgttgcctatacagctaaaaaacttaatttaaacgctgttatctttatgccagtcactacacctttacaaaaggtaaatcaagtaaagttctttggaaatagtaacgttgaagttgtactcactggtgatacatttgatcactgtttagctgaagctttaacttatacaagtgaacatcaaatgaactttatagatccattcaataatgttcatacaatttctggacaaggtacgcttgctaaagaaatgctagaacaagcaaagtctgacaatgttaactttgattatctatttgccgcaattggtggtggcggtttaatttcaggtattagtacttactttaaaacctattcacctaccacgaaaattataggtgttgaaccttcaggtgcaagtagtatgtatgaatctgttgtggtaaataatcaggtagtcacattgcctaatatcgataaatttgtggacggtgcatctgtagctagagttggcgatattacatttgaaattgcaaaagaaaatgtagatgattacgttcaagtagatgaaggtgcagtttgttctacgattttagatatgtattcaaaacaagcaattgtagcagaacctgctggcgcattaagtgtaagtgcgcttgaaaactataaagatcatattaaaggtaaaacagtggtttgtgtcattagtggtggtaataatgatattaatcgaatgaaagaaattgaagaacgttcattactatacgaagaaatgaagcattactttatcttaaatttccctcaacgtccaggtgcattgagagaatttgtaaatgacgtattaggacctcaagacgatattactaaatttgaatacttaaaaaaatcttctcaaaatacaggtactgtcattattggtattcaacttaaagatcatgatgatttaatacaactcaaacaacgtgtaaatcatttcgatccttccaatatttatattaatgaaaataagatgttatattcattgttaatttaacacatagtaagaaaaacagtcataaattgatttctaattgaaatcatcttatgactgctttttattatactttacatttctcgtttcgtcagattcaaacgttttcacttcgccaagccatctttctttgtgtttgcttttattttgacgttttagacataaaaaaagagaccttgcggtctcaatgcggctcatcgcatccactttttgcctggcaacgttctactctagcggaacgtaagttcgactaccatcgacgctaaggagcttaacttctgtgttcggcatgggaacaggtgtgacctccttgctatagtcaccagacatatgaatgtaaattatacattcaaaactagatagtaagtaaaagtgattttgcttcgcaaaacatttattttgattaagtcttcgatcgattagtattcgtcagctccacatgtcaccatgcttccacctcgaacctattaacctcatcatctttgagggatcttataaccgaagttgggaaatctcatcttgaggggggcttcatgcttagatgctttcagcacttatcccgtccacacatagctacccagctatgccgttggcacgacaactggtacaccagaggtatgtccatcccggtcctctcgtactaaggacagctcctctcaaatttcctacgcccacgacggatagggaccgaactgtctcacgacgttctgaacccagctcgcgtaccgctttaatgggcgaacagcccaacccttgggaccgactacagccccaggatgcgatgagccgacatcgaggtgccaaacctccccgtcgatgtgaactcttgggggagataagcctgttatccccggggtagcttttatccgttgagcgatggcccttccatgcggaaccaccggatcactaagtccgtctttcgaccctgctcgacttgtaggtctcgcagtcaagctcccttatgcctttacactctatgaatgatttccaaccattctgagggaacctttgagcgcctccgttaccttttaggaggcgaccgccccagtcaaactgcccgcctgacactgtctcccaccacgataagtggtgcgggttagaaagccaacacagctagggtagtatcccaccagcgcctccacgtaagctagcgctcacgtttcaaaggctcctacctatcctgtacaagctgtgccgaatttcaatatcaggctacagtaaagctccacggggtctttccgtcctgtcgcgggtaacctgcatcttcacaggtactatgatttcaccgagtctctcgttgagacagtgcccaaatcgttacgcctttcgtgcgggtcggaacttacccgacaaggaatttcgctaccttaggaccgttatagttacggccgccgtttactggggcttcgattcgtagcttcgcagaagctaaccactcctcttaaccttccagcaccgggcaggcgtcagcccctatacatcaccttacggtttagcagagacctgtgtttttgataaacagtcgcttgggcctattcactgcggctcttctgggcgttaaccctaaagagcaccccttctcccgaagttacggggtcattttgccgagttccttaacgagagttcgctcgctcaccttagaattctcatcttgactacctgtgtcggtttgcggtacgggcacctattttctatctagaggcttttctcggcagtgtgaaatcaacgactcgaagacacaatgtcttctccccatcacagctcagccttaacgagtaccggatttgcctaatactcagccttactgcttagacgtgcaatccaatcgcacgcttcgcctatcctactgcgtccccccatcgattaaaacgattataggtggtacaggaatatcaacctgttatccatcgcctacgcctgtcggcctcagcttaggacccgactaacccagagcggacgagccttcctctggaaaccttagtcaatcggtggacgggattctcacccgtctttcgctactcacaccggcattctcacttctaagcgctccacatgtccttacgatcatgcttcaacgcccttagaacgctctcctaccattgtccaaaggacaatccacagcttcggtaatatgtttagccccggtacattttcggcgcagtgtcactcgactagtgagctattacgcactctttaaatgatggctgcttctaagccaacatcctagttgtctgggcaacgccacatccttttccacttaacatatattttgggaccttagctggtggtctgggctgtttccctttcgaacacggaccttatcacccatgttctgactcccaagttaaattaattggcattcggagtttgtctgaattcggtaacccgagaggggcccctcgtccaaacagtgctctacctccaataatcatcacttgaggctagccctaaagctatttcggagagaaccagctatctccaggttcgattggaatttctccgctaccctcagttcatccgctcacttttcaacgtaagtcggttcggtcctccattcagtgttacctgaacttcaacctgaccaagggtagatcacctggtttcgggtctacgaccaaatactaaacgccctattcagactcgctttcgctacggctccacatttactgcttaaccttgcatcaaatcgtaactcgccggttcattctacaaaaggcacgccatcacccattaacgggctctgactacttgtaagcacacggtttcaggttctatttcactccccttccggggtgcttttcacctttccctcacggtactggttcactatcggtcactagagagtatttagccttaggagatggtcctcccagattccgacggaatttcacgtgctccgtcgtactcaggatccactcaagagagacaacattttcgactacaggattattaccttctttgattcatctttccagatgattcgtctaatgtcgtcctttgtaactccgtatagagtgtcctacaaccccaacaagcaagcttgttggtttgggctcttcccgtttcgctcgccgctactaagggaatcgaattttctttctcttcctccgggtactaagatgtttcagttctccgggtgtgccttctgatatgctatgtattcacatatcgataacatgacataactcatgctgggtttcccccattcggaaatctctggatcaaagcttacttacagctccccaaagcatatcgtcgttagtaacgtccttcatcggcttctagtgccaaggcatccaccgtgcgcccttaataacttaatctatgtttccatcctacaggaaacgcgttattaatcttgtgagtgttctttcgaacactagcgattatttcttatgaattcaagcttatttaaaactctttattcactcggttttgcttggtaaaatctatattttacttacttatctagttttcaatgtacaatttctttttagtcaagcgctcgcataagcaatatcactttaaccaaaaaatatttgaatgttaaataaacattcaaaactgaatacaatatgtcacattattccgcatcttctgaagaagatgttccgaatatatccttagaaaggaggtgatccagccgcaccttccgatacggctaccttgttacgacttcaccccaatcatttgtcccaccttcgacggctagctcctaaaaggttactccaccggcttcgggtgttacaaactctcgtggtgtgacgggcggtgtgtacaagacccgggaacgtattcaccgtagcatgctgatctacgattactagcgattccagcttcatgtagtcgagttgcagactacaatccgaactgagaacaactttatgggatttgcttgacctcgcggtttcgctgccctttgtattgtccattgtagcacgtgtgtagcccaaatcataaggggcatgatgatttgacgtcatccccaccttcctccggtttgtcaccggcagtcaacttagagtgcccaacttaatgatggcaactaagcttaagggttgcgctcgttgcgggacttaacccaacatctcacgacacgagctgacgacaaccatgcaccacctgtcactttgtcccccgaaggggaaggctctatctctagagttgtcaaaggatgtcaagatttggtaaggttcttcgcgttgcttcgaattaaaccacatgctccaccgcttgtgcgggtccccgtcaattcctttgagtttcaaccttgcggtcgtactccccaggcggagtgcttaatgcgttagctgcagcactaaggggcggaaaccccctaacacttagcactcatcgtttacggcgtggactaccagggtatctaatcctgtttgatccccacgctttcgcacatcagcgtcagttacagaccagaaagtcgccttcgccactggtgttcctccatatctctgcgcatttcaccgctacacatggaattccactttcctcttctgcactcaagttttccagtttccaatgaccctccacggttgagccgtgggctttcacatcagacttaaaaaaccgcctacgcgcgctttacgcccaataattccggataacgcttgccacctacgtattaccgcggctgctggcacgtagttagccgtggctttctgattaggtaccgtcaagatgtgcacagttacttacacatatgttcttccctaataacagagttttacgatccgaagaccttcatcactcacgcggcgttgctccgtcaggctttcgcccattgcggaagattccctactgctgcctcccgtaggagtctggaccgtgtctcagttccagtgtggccgatcaccctctcaggtcggctatgcatcgttgccttggtaagccgttaccttaccaactagctaatgcagcgcggatccatctataagtgacagcaagaccgtctttcacttttgaaccatgcggttcaaaatatcatccggtattagctccggtttcccgaagttatcccagtcttataggtaggttatccacgtgttactcacccgtccgccgctaacatcagagaagcaagcttctcgtccgttcgctcgacttgcatgtattaggcacgccgccagcgttcatcctgagccaggatcaaactctccataaaaattatgatgtttgattagctcataaatactaaataatgtttgtaacttatagttacgtttttggaattaacgttgacatattgtcattcagttttcaatgttcattaaaattatctatggagcgggtgatgggaatcgaacccacaacatcagcttggaaggctgaggttttgccattaaactacacccgcttatttaaattaagaattttgatgcggccgagaggacttgaacctccacgggatttctcccactaggccctcaacctagcgcgtctgccattccgccacgaccgcggatataggcatttaaaacatcttcgtttttcagaacgttatttattatattatgtttaaaaatatttgtcaataacttttaatcgtttttttacattaaattaatttgtgttatcagttgttaacacaacgctatttataataaaacatttagaacttattgtcaacatattttataaattaaatttagaattgactgtctttcaaatcaaagtttatttaatttgttcttttttaaggaacgtgtttaatcatactaactataagctgtacagtcaatagaaaagttcaatcaaaatgtcatgaaaaatgtataattatcttttgtgctactttaaagctttaattgggtaaagtttatatattaattattactaaaatacgccaagatttttaatctaatcattttaatttcatcctatcaagccacaatttatgccattacctatatcataagtagaaaagccgagattgcgaagtattaaattacgacaatctcggctttaaacattttataaacacaatttcttcttattcaattactatgtttaccaatcaaaataactcactgataaattctatataaattccatacaactcataaataatcttacatatacacgaattagctctatttgtattgtacttatttcaattgtcttttcattcttaattttccattgcaatgtccgcaacgcatacgattcgtatcaactttacggatacgtatatattttgcatgacatttagtgcaataatattcataatttgcccgttgttgatagctttcaatgctgttacaaaatctaggcgctccaacctgttggctcaatcgtttaaaatcttgatctttatgttgataacctttaccagcaatatgcaagtgataatgacacaattcgtgcagtataatttttacaacagcatcttctccataatgctcatattgttttggattaatttcaatatcatgggactttaaaagataacgtccgcctgttgtacgtaaccttttattaaaatatgcacaatgtcgaaacgtacgtccaaatttttcttccgaaagattctcaaccattcgctgaagtttgtcattattcatgtggatcaatcatcgttaatgatactttgtctttatttttgtcaatactgtaaatccaaacgtcaacgatatcaccaacactgacaatatccattggattttttacgaacttcttagaaagtttcgaaacatggacaagtccatcttgtttaacacctatatctacaaatgctccaaaatctactacatttctaactgtaccactcaatttcattccttcttgtaaatcttcaattgatagcacatcggatttaaggattggtgtttcaaactcgtcccttggatctcgattaggtgctttcaaggatttaataatatcctctaatgtaggtacaccgacttgtaattcaatcgccagttcatccatatccaatgaatttaatttagcttttaatgcatcactacctaaatcattgccaccaaatccgagtttatctaataactgatacgttactttatagctttcgggatgaatcgatgtattatccaatggctctgaaccgtctactattcttaaaaatcctatactctgctcaaaagttttagcacccaaacgcttaatcttgcttaactctttattatgctttattgcgccattttcttctctatatgcaattatatttttagcaatttgcgaacttagaccagacacatattgtaataatgatgatgatgctgtattgacatcaacacctacttggttaactgctgtttcaacaacgaaagttaatgcattttctagtgctttttgattaacatcatgctggtattgtccgacaccaatagatttaggatcgattttaactaattcacttaatggatcttgaacgcgtcgtccaattgatacggcacttctttcttccacttgaaaatcaggaaattcatctctagcaatttctgatgctgagtatactgaagcgcccgcttcattgacaatgatgaattgtactggcaactgatgctttttaattaaatctgcaacaaattgttctgtttcacgacttgcagtaccattgccaattgcaattaattgcacatcatacgctttaaccatttgtacaaaatccttctctgctgcctcttttttagaaactggtggatgcggataaatcacaccttttgctataaaagtaccgaatgggttaatgactgctaatttacaacctgttctaaatgctggatctacgcctaatatttgtttacctttcattggaggttgcagtaatagatttcttaagttttcactaaaaacatctattgcatgattttcagctttttcagttaaatcagcatggatttcacgctctatcgaagggacaattaagcgtttcaagctatctttaatcgcctctaaaatataactgcgatttacattattatgattgatttcttgacgtgcaatgaaatcctctactgatgtcgtatcgaattcaaactttacagataatactttctctttttcaccacgattaacagctaaaactctatgattagcaatgcgtttaattggctcactatatgcatagtacatttcaaaaatacctttttcatcttcagcatttttctttttagatgtagttaacacaccttgatgatacatatcttttaaaatttttgttctatatttaggattatctgaaatttgttccgcaataatatcttgtgcacctttgatagcatcttcaaccgattgcacttcttcatttataaattgttgtgctttttcttcaattgagacttcatgtttacgtgccttcatccatatcgctaatggctctaaccctttacgtttcgcctcagttgcccttgtctttttcttttgtttaaaaggcctatataggtcttcaacacgttgtaatttgttctgttttaaaatatccttctttaattcctcagtaagtaatccttgctgttctatatttttgataacttcttctttacgtttttgtaaattgaccatatattggtattcgtcatcaatttgctttatttgaacttcatctagtccaccagtttgctcttttcgatacctcgcaataaatggtactgtatttttttcttctagcagtgttaatactgcttcaatttgttttttactaaattgatatttctctatgattgaattaatcaattgattgtccatttacttaacccacactttttcttaaatttactcatttattttaacatattctaaaatacttctattaaggtatgatacttaatgtaattttcacttccaaaacatttaaaacgaatgattaggtcatactatattttaaaacgcactaagattattgaaaatgacacaccatcatttctaaatttcataatctaagactactttttttattctaatagcaacccacctatttaaaacgacaattagatatcttcttcacttaaattattaatactatatcgcgacatttatgtggatacacattaaactacactaataatgtattaattcgaaaatcttaattaaattaaaaatacccctcgatttcaatttaataatcaagggataattatatggatttttcattataaaacgtatcattaataaacaaattctattgatgtgctgcttcttgtaatttcttaattgccgttctctgaagtcgtgatacatgcatttgacttaaaccgatacgctcacctgtctctttttgactcaatccttcaataaacgtacattgtatgatttctcgttcgcgatcagataatataggtaatattttttctaaaatcatacgtttttcagttaagtcataatggtcatcttgttgccccataatatctaatagcgtaacagttgaaccatctttatcagcttcaatggaatgatcaacacttaacgcattataactttgtcccatttccattgcttctaacacttcttcttctgagacttctaatcgatcagctatttcactgatagaaggtgaacgctctaattcagcggttagttcatcgctcacttttttgattcttggcccaatttctttaatacgtctcggaacatgtacactccaagttttatctcgtagatatcttttgatttcaccgattacagtaggtactaaaaaggcttcaaacttccgttcaaaggacatatcgaatctatttatggcacctattaaaccaaccataccaacttgaactaaatcttcgtgatgtgattgtcctttagaatatttatatgccaatgactcaattagtttttggtaatgtttaactaacttatcctgtgcatctgtattcttattttcttggtgttctttaatccattggttaatttgctcaggtgaaatttcattagctgatttcgactctttcgccattatttcgcacctgctctttttttatatacttagtcatactgattgtcacaccagattctttatatactgtgacttcatccattaaagattcgattaaaaataaacctaggccaccttcgcgtaaaaagtctatattttcgtctttatcgtaaggacctatttttgatttagttgtttcataatcaaaactgtcacctttatcagaaataacaattttaattttatcttctaaaatttcaaaatatatgttaataatgcccacattgttattttctttgtatgcatgtttaactgcatttgtcacagcttcactaactgcaatcttggcatcttcaatatcatcatatgtagcaccagctctcgaaaaaacgccagaaagtgttaaacgaattaaacttacatactctgccgatgctggcacgcgcatttcgataaaatcttctttagattgcatgttattcgacctccgttccttcattaacatgcattaaatccttaagaccagtaatttcaaatagtctaccgatacgatctgacacacctaaaatgtatagttctttatcattttggtttaatgcttttaatgtacctacgaataaacctaaacctgtcgaatccatataactcacattttctaaattaacataaatatcacgagttccatcttgtctcataggtgttaaaacctcttctaattcaggcacagtataaacatctaattctccaccgactttaacttcgtaaaatttatcttgagtggttgtttctatattaagattcatttcattacactcctacttattaaaaatatttatcttcattttaagcgctgtatccaccatatttatatttcaaattattatatacccatcgaaataatttctaatcttcttttttaaattaatttactctttttataatcaaaatagtcatatcatcttttttatttgggttttgaagctttaaaattgcttcatagataatttgaacaatatcttgtgggtgcatatgtttatgttttttaatatattctaaaagtttttgtttatctataaaggtaccttcactatttctagcttcagtcacaccatccgttaaaatgataattaaatcatcaaggtatattggaatttcttgttgttgatatcgtgtttgtgaactgattcctaacactctacctctaactgaaatttcttcaaattcttctttttcagcgcgataaatatatccaggctcatgaccagctgaactacaatacaataaatggttcatttcttcatataaaccataaaacattgtgacgaacatattttgattaatattcttttcaacaacacgatttaaacgttttaaaccatcactcggtaattgtgagtgtccataagaatccatgccaaactttatcatactcattgctaaagcagctggtataccttttccaatgacatctgcaacagcaaagctcattgtgccatcgttatggtcaattaaattaaaataatctccacttactttttgtgccgccactgaaataacgccaatttgaatactatcaaattgtggaatatctgttttaagcattgtttgttgtaagctagaagctaagtctatctctttatcgtgaacttgaagtttatctaccaatctttgataatctcgataactataaccaaagcctttaacgatttcttgtaagacatctaatgtcttgaacacatcttcacgcgttaagtttaacgtcaatatatagtttttgtgaatatcgacaatgtcttcaggcaagacgtccttacgaatcacttcgtcagtgtatttctcacacttttttatcaattctactttatcttggcacgttaaactttcatcaattaaacccttataatgttgcttaaattcttccacgattagttgcctcctcacttcccttacaaagcaaatgcttaagcaaggataattatgattcacttactaacatttatttaattgcacttatcaattttgtcgtttgcaattttgctgtagatgatacttttaagctaaaaaaaactttaggatggaatacctaaagcctaaaaaacttaagacatccttttataataaaaaatatgaatatcataactggtatttgctaaaatctttgtttataagaaaattcttcgtacagaatttagaaatagttataattattataaagttattgtcttttatatcaatattttatttatctctgaaaaatacatataatagacgcctaatttttctggtgagctactgcattcagccctaaactaatcattagtgcattatctacttctttcattttatcatcggataagtacgtcagtttttctttcaatcgttttttatcaagtgtacgaatttgttctaataatataactgagtctttatccaacttatactttttcttttcaatctctacatgtgtcggtattttcgctttattaatcctaccagttattgccgcaacaataactgtaggactatatttattaccagtatcattttgaattatgactacaggtctgactcccccttgttcagatccctgtactggtgataaatctgctaaataaacatctcctcgtctaatcattcattcgttgaattagaagataaatatgtttcgttgcaatcgcatgcttcacactctatcggaaaagcttcgttcgctagggagagatttaaatcagccatttgtgaatatccttcttttaaagattgttctaagctatgacttctattttgactaaaagataacatatgagaacctccaattgattccaaaagttattaaatgacctttaattactctaatgataacaaattttatatgcactgaccatattattttaacaattcatttgttacaaaacgttgatcaccatcatgatagattcgcggcaaacgtctcgacaagttacaaagcacttcataattaatagtatgttgcttttcagctaccacctctaccgactgtggactttctctatgattatctattaaaatcaccgaatctccagctttaacttgatctggcactttaacaattgtctgatccatacatacgcgaccaataacttcgcattgatgaccatttacatttacaaagctaccttgcattatgcgtaaatagccatctgcatatccaataggtaacaatgctattgtagttgggtcagtagctgtataagttgcaccataacttacagactcacccgcttgtagcgtctttgtttgaactacattagcaattaattgcacacttggtttaaggtgtactttaactttttgctgtacatactctgatggataatatccataaagggaaattcctggtcttattgcattacagaattggcaatccattaatagagagcctgctgagttctgacaatgtatatattcaggtttaattgcttcattgaccatatctttaaaacgttgatattgttcagttgtcatatctcctggttcgtcagcacaggcaaagtgtgtaaacacgccttcaaatacaagttgctcatattgttgaatgatttcaatcacttcttgatacgttttagtatctttaatacctaaacgtcccattcctgtatctaatttaatgtgcaaccataactttttctcttgctcaccagaaatgtttttaattgcttctttcaaccactgtttagacggaaccgttaaggcaactcggtgttgtatcgctttatcaatatctttagctggtaacacacctaagactaaaattttagcagtaatcccatgcattctaagttctatcgcttcatctaacgttgctacagcaaaaaatgtggcgccattttccattaaatgacgtgctactttaacactacctagtccataggcattggctttaacgacagccatcactgttttatttggatgcaatgtactgaatactttgaaatttgatgcaacagcgtttaaatctacattcatatacgcagatctataatatttatccgacatattacttcctcctgtaattcccacacgttttaaaactagatcttaattatcattgtataacaaatttaaaatgctgacttttctaaaacaacttggctcatcgcataatgctcagtgtgtgagatactaacatgtacgataaacccttcgtaatcaatctttggtttgccaagttcgtcgttgtaacagtctatatcgttaaaagctacatgttttcctaagcctgtgcctaatgctttactgaacgcttcttttgtagcaaacctgccagctaaaaattcaattttacgttgctcatgtgtgaaattgttgaatttgtgctgttcatttttagttaaaatccgctcaaccaattttggttgcttactatataacgcttgtattcgatcgatttcgattaaatctacaccaattccatgtatcattgattattcctcatttttattgttttctaaatgtctctcgttatttaaccatcgtttcaatctacgtgcttcacttctatctattaattcaatttcagcttgaccacccgctgtataaagggtcaaagttgctaatcgatagcgtctcattataggaccaacatcgatatcaatattttgaatacgaaaatatggtattaccttttcatccaaaaataaaatgccgtttcgtacacgcaaatggtgtttttcaaatgcatatctgcagtgcttatatcgatagactggcgctataacaagcgtgaaaacagcaacaagtaatattataatcacactactaacaatggataaatggttatctaaaatctcccaaaatagccagttcaaaatattaaatgcgattaaaagtacaagcgctatgggtatccaaaacagcacagcacttaacctcatcacttttttagcgtgtggtgacataaaattataatccctcatcattttcacctcttaaataccatgatttcaatttatttgcatcttcacttcttgcgtattttaagttaatcgattgggctcccacacctttagcaacaataaagctaaaattatttaaattgttgcgtttaagtaatgtatgttgccaagtgtcaaatcctataatgtgatgcgctttaaaataataaatatttcgtttcaatagctcgaaattctggatagtaatttgttcttctgtcattttaaaacccgcatgtttgacataaagatatcctttgatcacaaataaaccaataatgactattgttataatcgtaaataacaataataattgattccaaaaataacagcctatacctgccatagctatgacaataatactaggtattaaaaagtgtctgtggaaacctgacaaaggcataccttcattaacttgttgataagataaatctggtactaaattctggataatttgatatgctttgtctcgtttaataaacggcaatatcggcacactacctgaatcattgtcatcatcttcgatttttttattttcaaaatcacttgtgatgataaaatgtattgctgtgtagccaaataatcttcgtatatatgactgacgttcaacaacagcttgcaatcgtttcgttggtacagttactttcttcttgttaaagagaccatattcaattttaagttgctcattttcaagcatcaccgaaaagccataaaatcttatcattgttataatcgttccaataatatatgccactattaatactagtaaaatgatgattaatactgaaatacttacaatttgaacccattgactaatttcatgatttagcttcgaccatgggatcaactctcttacagccccgtaaatcggtactaaagctgctaacgttacaccaatggcgccactggtcattgccataaatagtgattctttaaaattcatctgatatataggaatgcgtttatttttctgattaagcatactatcagtgttctgcacttcatctaagcgaccttctgcgatgtcttccacattaccttcaatgtcatgattacagttgtcattcttctcagcactagacttttgcgccacttctgtcttcaactctgtttgcaattgatcaatatatcgttcaagatattcaccttgttttttcgaaataacacttaagacaataccatcacttggtgttttgatttgtaaatccacaccaccaataatttgattgacgaccccttgtgtcatatcaacggactgaatacgttttatatttaattctttacgctttttattaaaaatacctgttgttaaaatgaaataattatcctcaatccaatatcgcgtgttcataattccgacaatttgagaaatgtatgatattaaaaagaatacaaatacaatacctatccataaatatgattcgggattcgtataatcaaaatctttcaattgaaagataatgaaaataaaaaagacgactatgttttgtttgatagcattgattatgccattaaaatatgaaatcggatgtaatttttgaggttcagacatcactttcaacccctctcaaattcgacatagttctctcttcgattattttaacatcgtcatgagacatcatcggtaaataaatagtatgacctgcagtcataaatccaactttatacaaattaagcactttactaattggattagatttaatcgacaagtattgtaaacgttcaattcgactcgtttcttctttatatataaaaaatgatgtacgatattgtacacttagttgatcaactttataaaagcgacaatgatattgccataaaggcttaataaataattttaatgtactcagagcacctaaaaccaacaaaatataaagtaagtaatgtggccattcaaatcttaaccatataaaataaaaaatgacatacacagctacactcaatataaattctaagccattcgtaatgtagtaatacaacaatgctgacttaggactcttagtcaacttagtataatctgacatatacccctctccccaaataaaaaattatacggatttataatctatttcattttatttttatatgatgataattatagcatatggaatatttcatgctaatttattcttcctaaaggtacatctaaaaatttaattaagcagaaagtgcttgaattgctaaaaagacaccatgtataattttatcaacatgatgcctttcatctataatcaatctttcatcttatcaagagcgatatttagttcaagcacattcacataatcatttgttaacacaccacgctgcttacgatgttgaatcaagtcggccactcttgaagtagatacatgacgagcatcagcaatacgaggtgcttgcttcaatgcattttcgaccgtaatatgcggatctaagcccgacccagaacttgttgcagcatctattgttacatttgaattcccaaatttaacatgatgtttcatgcgtgctattaattcggtgtttccattcgattcattacttccacctgaagatacgccgtttttatataatttttcaggattcatattataatcaactgcactcggtctcccgtgaaaatatcgtgtctctgtccagtgctgtccaatcaattttgatccaactatacgattgtcatacgtaattaaactgccatttgcttgttgataaaaaaatatttgaccaattaacgtgatagctaacgggaataaaaatccacataataccatagttattatcgttaaacaaatactatttcttatcgtattcatggtacaggctccttcctctttacacaaaaaattgtacaatcatatctattaatttaatgcctaaaaacgggacgattaatccacctaatccataaatcaacatattatttataaagattctatcaatgctgtaaccctttacttttacacctttcatggcaattggaattaaggcaacaatgattaatgcattgaatatcaaagctgatataattgcagatttaggtgacgataaatgcataatatttagtgaagtcatttctggaattgttgacatcattagtgcaggtaaaattgcaaagtattttgctacgtcattagccaaactaaatgtcgttaatgcacctctcgtcattaataattgtttgcctatttttacaacctctattaactttgtaggattcgaatctaaatcaattagattagctgcctctttagcactaattgtccctgagttcatagctaatcctatattcgcttgtgctagcgcaggtgcatcatttgtaccatctcctgtcatcgcaacaatatggcctttcgcttgttcatctttgatgactttaattttatcttcgggtttacactctgcaacaaatctatcaaccccggcttcttttgcaattgtagctgctgttaaagcattatcacctgtacacataactgtttcaatccccatttttctcaattcagtaaatcgttctacaagaccatctttaatcacatcttttaaataaatcacgccaagcatgacattgttttcaatgactattaatggtgtgccacctttactcgatacatccatacagagagactcaatattaagaggaatattgccttgttgttgtttgacaagatttatcatactattaggtgcacctttgaataccgatatttcatttgtaatgattccgctcattctagtttcagctgtaaaaggcttatatgtgccatcaatgtctttaggcagctcatttatatacatctgcttcgctaatcgtacaatactttttccttctggcgtatcatcgtagattgatgacatataagcagcgactatcaatttttcaagcatttgttgattcactggtaaaaattcactagcgattcgattgccataagtgattgtgcctgtcttgtctaaaatcattacatcgacatctccacatacttctacagcacgcccacttttcgctaatacattgaattgagtaacacgatccatgcctgcaataccaatcgccgataacaaaccaccgattgtcgttggtattaaacatactgttaacgcaatgagcatcgcaataggtaaaattaaatgcaggtaagatgctattggatataacgttacaataacgactaaaaatataattgttaacgttgttaataatgtaaaaagtgcaatttcatttggtgttttatttctttccgccccttcaactaaggcaatcattttatctaaaaaagatgtacccgcttcactctcaacacgtatttctaaccaatcagatgttacaagtgtaccgccaatgactccatcaaaatcgccacctgattcttttatcacaggtgcagactcaccagtaattgcagattcatcaacggttgctaatccatttattacaacgccatcagcagggattgtttctccattttctacccgaatattttgtccggcttttaactctgtggcgttcactatccgatacgcaccattttcttctatcaatcgagcagttaaatttgattgtgcttgtcttaaactatcagcttgcgcttttccacgaccttcagcaaaggcttctgaaaaattagcaaacaatatagttattaataatatgataaaaattgtaatcaaataacctcgcgatagatagctagttccaaatatgtcaggaaaacatattaatatcaacgttaaaatcattccaacctcaacgacaaacattatcggattttttattaattgtttaagattcagcttataaaaactcattttcaaagcttctatcaccattgtttgattgaaatatttatttacatgatgcattttttccatccctttactttattttaaagttaaaaattcaccaataggaccaagtaatagtactggaataaatgtcaaaccacttagtaaaacgataaatacgattagtgatacgccaaaataaggtttatcaatcgctattgtatatttatcttgatggtatgattttttattcactaaacttgatgcaatcattaattgcaaaataattggtatataacgagaaagcaacataatgattcctgtagagatattccagaatgttgtatcatctttcagtccttcaaaccctgatccattgttcgcagcagctgatgtcatttcatacataacttgtgaaataccatgaaaagacggattcgttatactttcacttgctccaggaatcataaaagcaagtgctgaaaatactaaaattaaaattgggtgtatgagaaagactaagacaatacatttcatttcacgggcgccaattggcatatttaaatattctggtgttttaccaaccatcaaactgcatataaacaccgtcagtaagacaaatatcaataaattcatgagtcctacgccttcgccaccaaatacaacatttagcatcattaataccattggtcctaatccacctataggcgttaagctatcatgcatgttattaacagaacccgttgtaaatgccgtcgtaataactgtaaatagtgctgacaaacctgctccaaaccgtacctctttaccttccatattcggtccataaatgcctaaattcgctagtattggattaccacgatactcactccacatagttaatgtaagaattgctataaaaatgaaaaacattgcgacaaataatatcaacgcatgacgatgtactcgtttaccatgtctacttaacatgcgaccaaataagaacaacattgacataggaagtaacatcatactgcccatttctataaaattgctccaaatatttggattttcaaaaggtgtcgcagaatttcctgctaaaaatcctccaccattcgtaccaagatgttttattgattcaagtgatgcaataggtccaaatgcaatatgttgaatatgtccgcttaaagtccgaatcattaaattagcatgcaacgtttgtggtacaccttgagtcatcaataaaatactaattaaacatgataatggtaaaagtactcggacaataaaccgaacaatatcttgataaaaattaccaatgatattagttaatccagttaaacgtctcaacatcgctatacaaacggcgtaacctgatgcactagatgtaaacattaaatatgtcattacaatcatttgcgttaaatatgtcacatctgattcaccgttatagtgttgtaaattactatttgttaaaaaagatattgctgtattaaacgctaaatctatcgattggtttaaattatgatttggatttaaaaaaagccattgctgaactattagcaatacaaatgttataaaccccataaatccattaaatgccagaaaatgtttgacatatgttttagctgacatgtgttctaaatctgtgccgataattttaaaacacatattttcaaatctagtaaatattaaatctactcttgacgattgcaccaatgctacgcgatatagatatccactaaaaacatacgtaatcataaccatcattgttagaaacaaaattatttccatgataaccctcacttaatatatttctaaaatttttcactacgaattaaggcataaaataaatacaaaactaatgcaataactaccagtaataaaacgatgagcattgccataacctccttacaacacaacaacatcgtaacaacttgtttatgagagaaatattaattttcaaacttagttattaagaaatcattaagatgtgtatgcagaaataaattttatagcatttaattgtgaagaatattatgatattgctatcgaggtgaaggttatgtcaaacactgaatcgctaaacataggaaaaaagcgtggatctttaacaatttacatcggttacagtccaggtgttggtaaaacatttgagatgctttcaaatgccattgaactatttcaaagtaacgttgatattaaaataggatatattgaaccgcatcagcgtgatgaaacaaatgcattagctgaacaattacctaaaatcacaaccaattttactaaacatggtagtcatcattttcaatatttagatgtcgaccgcataatcgaagaatcgccgacaatagtacttatcgatgagttagcacatacgaatatttctagagatcgtcatgagaaacgatatatggatattgaagaaattttaaatcatggtatcgatgttcataccactttgaacattcaacatattgaaagtttaagtagtcaaattgaactgatgaccggtgtacatgttaaagaacgtgtacccgactatttcataatgagcgccgatgtattagaagtcgtagatatctcacctgaacaattaattaaacgcttaaaagctggcaaggtatataaaaaggataggctagatgtagcatttagtaatttctttacgtatgcccacctaagcgaactgcgtacattgacgttaagaacagttgccgacttgatgagtgataaagaaaaagtccgacacaaccataaaacgtcactcaaacctcatattgctgtggcaattagtgggagcatttataatgaagcagtaattaaagaggcattccatattgctcaaaaagaacatgcgaagttcactgctatttatatagatgtattcgaaaaaaacaggcaatataaagatagtcaaaagcaagtgcatcaacatctcatgcttgcaaaatcattaggagcaaaagtaaaagtagtttatagccaaaccgttgcattaggattagacgaatggtgtaaaaatcaagatgtaaccaaattaattatcggacaacatattagaaataagtggcgagactttttcaatacacctttaattgaccatttaatgtcctttgaacatagctataaaatcgaaatcgttccaatcaaacaaatacctgttgaattgaaaatgaacaaatcaccctatcgtcctaaaggcaaacgtttcgccatagatatgttaaaaatgattttgattcaaataatttgtgtaatgatgggactgtggatttatcaacttgataagcatgagtctagtacgattattttaatgatttttctcatcggcatcattttattatccatttggacgcggtccttcatcattggctttttagcagcaattattaacgtatttgtttttaattatttttttacggaacctagatatacatttgaagtatatcgctttgactatcctattacatttatcgttagcattttaacaagtattttaacgagtgctttattaaaacaaattaaattccaatactccattactaaaaagcaactttatcgtacagatttattatttcaatttaatgattcgattaaacaaacttatacagttgaaaacttactaataaatgctggataccaaattaatcaattattgcaacaatcaattactatatacgttatcaatcaatcgaaagtaattaaaacaataccattgcaaaaccatatcgataatacgactcaacagcatgaacaagcattaagctgggtaattaaaaatgaaagacaagctggtgcaacaacagatacatttccaggcattaataaatggttgataccaattggcacatctccgattaaaggcattctagccattgattaccaaagttctcaagtgattaatccatatgatgcatcaatattagaatcaatgttaaatgaactttctctcgccgttgaaaatgtgacgttacttaaacaaacgagagaatccatgttacaggctgaacgtcaactgacacattcaaattttttaagatcaatttcgcatgacatacgtacaccgttaacaacaattatgggaaatttagatattttagtatcacatagtaaagatatgtctatcatagaaaaggaacaattacttgtacatagttttcaagaaagtcagtatttatatctattagtgacaaatattttatcattaacaaaattacagtcatcaaatgttcagataaaattgcaaccttatctcgttagtgaattagtagaagaaatcgatatgattttagaacgtcgccatttaaaaaagcgtataactgtatcatcctcagtaaatttacagtttatacacattgacagtaagttgattttacaagctttattcaatttgattgaaaatgcagttaaacacacttctactgacaccaaaatcaatttatctattcgttatgctagctatgaacaaatcgaatttgccgttatagacgaaggacctggaattagtttagaagaacaacaaaagatattcgagcctttttacacaggatcaaataaatattttaaagataaccaaaaagaaagcatgggactaggcttatatttagtacagactatcctacacaaacatcaatcaaacttacaatataaaccgaaccaaccacacggcagtatattctatttcaatatatatacagactttaacgaaggagacgtataatgcaatctaaaatattgataattgaagatgatcacgcaatcacacatttacttgatgttgcattaactttagattattacaatgtaactacagccgacaatgccacacaagcacactttaaaattcaaattgataaaccagatgtcattttattagatttaggtttaccagataaagatggattatgtttgatttcagaaatcaggcaacatactgacattcctatcattgtaataagtgcaagacaagaagaacaaacaattattcaagctttagataacggtgcgaatgactatatgactaaaccttttaatgttgatgagcttcgggcacgaatacgagtcatcgagagaatcgctaagtcacatcaagaaactaacattgtatttactaacggtttgctaagcatcgactttggctccaaatctgttgttattaataatcaggaggtacatttgacgccaaatgaatttagcttgttagaactattgtcaaatcataaaggaaaagtactcacttatgagatgatattaaaacgaatatatggctatgttaataagactgaaatgcctagtttaagagtgcatatgacatcattaagacaaaaactttcacaatgtcatgaggacgcaaaagatattattaaaacacatccacgcattggttatcaaatgttgcagtggaaagagaaataattaaataaaaaagatcgctgccattaaacgaatgattggcagtgatcttttttatattcaacttattatttatcgcgcactagcgtcagcaaaaagccctattgttttttataagaacatgatactgaaatttcataaagtttatttatgttcgattattcttaatttaaaaatagttctttaaattatatactcaccacatttggtggagaaccatatttacacagaatgatataaccgcatacagatctcaatccaattaaatatttaacctttaaaacgttagtactttgatatctacagagaatcaattattgaaaacaaaaaagagctcaagacattacatctttaagctcttaatctataaattatttttgatggtcagcaaatgtgcgacctttcataggtctgcttccaccgctgctcttctctttacggtcgaatttttttgtacttttcttcttacttgagtatccttttgaacgtttactcttactgtcaaatttaggattaccacgcttactatttctgttacgagaaccacttggtttaccgttacggcctttgcgagataatggtttttcaaaagttaattgaacttcaacttcatcgtttgcttctactaactcttgtaaaagtgcagcaactaaatcaacatcgttatattcatttaacaactctgtagaaatgcgtttcaagcgtgattctgactctttagacatccagttttcaactttttctttgatgtcatcttcacgtgcttgaagtacttctttacgatgtggtggacgaagtgcactcatttttctaccgtttgcatcttcaatttgtctgatataatccatttcgattggattaacaaacgttacagcgataccttctttaccagcacgacccgtacgaccaatacggtgtgtatagctttcagtatcttgaggtatatcaaagttataaacatgactcacaccagaaatatctagtcctcttgctgctacatcagtagcgactaaaatattaatttggtcatttttaaatttctttaatacttctaaacgtttcgcttgtgtaatatcaccatgtaaaccttcagctttatatcctttagaaatcaaagcacttgttaattcatcaacacgacgttttgtacgtccgaatacgattgctaattcaggttgatgaacatctaggaaatttgtaaatgtatcaaatttctctaattctttaacaattgtatagaattcttcgatttgtggatcagacatttcattattcattgtcttaatgatttttggtgatttcataaattgttgtactaaagcttggattgctttaggcattgtagctgagaacaacattgtttgacgttgtactgctggaattttatccataataaatctcatatcatcgatgaatcccatattcatcatttcatcagcttcatctaaaatcaaagtatgaattccgtccgtttttaatgtgcgacgatttaaatggtcgataacacgcccaggtgttccgactacgatttgtgggccttttttcaaggctttaatttggcgttcgataggcataccaccgaatacagtaacaacttggacaccttgtccacggctaaattctcttaattgttcagctacctgcattgccaattctcttgtaggtgctaaaatcaacgattgaaccccttgtttccctactactttctcaattaaaggaataccgaatgctcctgttttacctgtaccggtttgagcttgcccaaggatatcaattccttgtaacgcataagggatactgtctttttggataggtgtcggctctttaaatcccattgattcaagtgactgaaccgtattatccgaaatccctagttctttaaaattttgcaaaataattctcctttttacctgtttatttctcaatatacttttgcatataagttcattaatatttcatcaacttctatatagtaccaccaaaaaaatttaatcgcaataaagcaatttgcgaatatttattagaatcacattaattgattgtcatatttttgtcaaaaagctagcattagataagatgtaagcgttacgcatcattcgaataatcattataaaaaattttttataaaatacgtatatcgttaacattccacaacaaattttactgaaacacatgtgaaattagacattataatactacatctttttgtaaaacattatataaacattcaaactacttcctatataaagtgtgtacatagaattaaccttgatttagtttcaaatttatagatttaacataaaaagaaaaaggcaattttgtatttacacacaaaaccacctcttctttgtaatcttttagtattaattcaaatcatttttataagtaaaaggtccctcgactaatctctatgaaattaaagcatttaccacttcttctaatttcataccacgtgatcctttaactaatacacggtcatgcgcttttaaatcgtttattaaaacttctatcatatcgtctttagaattgaagtgttgtgctttttcgacatgttgctggcccgaatcataaatatacttcgcttcattaccaaacgtatacaacacatctatatgcttttcttctaaataattacctacaccgatatgcatttctttgctattttcacctaattctaaaacatctcctaaaattagaatgcgacgccctgtcaaagtactcagtgtatcaatagctgctctcatacttgtaggacttgcattataggcatcatttatcacagtaatatcattttctaatgtatgttgttccatacgcataccagttaagctgacattttttaaattttgatagattgtgttatatatcaaacctaattcatgaccaaccgcaatggcaatcgtcgcatttttcatattatgctttcctaatattggcagatcgtaatgttctttattattaatcgtaaatgaaatacctgtagtatctctatcatcaacagaacaaactaatgcattatcagtagcaacaccaatactaatacattttgcattttcaacttctttaacatgtggtttcaataatggttcatcgccatcatatataaacgtaccattatcttttagacctattgtaatttcagatttagctttagcaatcccctcgcgcgaacctaaatcttgcatatgtgactcaccaatattagttataactgcaatatctggttgagcgaggtttgacagaaattcaatttcatggaaacctgacatccccatctccaatattgatatttcagtatcattatctaattccaaaatagttaaaggtaaaccaatttcattattgtaattaccttgcgttttcttaactttaaattcggtatgcaatacactttcaatcatatctttagtcgttgttttaccattagaccctgtgacggcaattactttagggtttacatgtctcaagtaagcttgtgccaattgttgtaatgccgttaatgtgtcttcaacccatataataggcccgcttacattttcatctataggtgtccctctttgataaaaagcagccccagcaccatcttgtaatgctttagagacaaagcgatgaccgtcaacattttcacctttaaatggtataaataacatatttttagaaattgctcgtgaatcaattgtgactccatttatctcttgatttaaaaattgatcttcaatttcacaaggaatccatgattgaatttgctttaatgtaacattaatcataataacaacctcagttagtcaattttgtatttatttttctgtttatcctggtgacgttctttagcaagctcgataagttttgtaatcaattctggataagataagcccatattttcccataactttggatacatactgaaagccgtaaatccaggcattgcatttgtttcattaatatatatttggttgtcttctgttacaaagaaatcagcacggactaaaccagaacaatctgtcgctttgaatgcctctaatgccatatttctaagcgttaattgaacatcttcgtctaagtcagctggaatttgtaattgaaccttaccatctttatattttgatttgtaatcgtaaaacgcgacatcttttacgacttcacctggccatgtcgcttcaggatagtcatttcctaaaactgctacttcaatttcacgtgcgttaacgccttgttctataacaagcttacggtcaaattggaatgcttctttaataccttctttaagttccgcttcattattacatttactgatacctacacttgaccctaagttagcaggtttaacaaagactgggtaatttaatttatcatttactaattttaaaatgttatgttcatatttttcatattcagaacgtaagaaactaatataaggtaactgtggtaaccctcgatgttcaaataattgtttcattacaagtttgtccatagaacttgcagctgacaatacaccatttcctacatatggtacatccaaaacttcaaaaagcccttgaatcgtgccatcttcaccattaggaccatgtaataatgggaatactgcatcgtatggttgtcctgaactactttctttcaatagctgtgaaatctcaagcgcctctccattttctaaatgaagctcatcagtagatttaatttcagctgtaatattattttgctttctccaatcaccatcattggtaatataaatgatatcaacatgatatttgtctttatctattgcatttaatacattttgtgctgtcagaatcgatacttcgtgttctgcacttttccctccaaaaacgatacaaatattttcttttgtcatttcgttttcctccaatgatatatcagggtttgctaccttaatataaattaatattgatttagtcctattgttaattgatttattcgcatctttgaatcttaatagtatcacattttaatgctattttgcattttaaaaacgaggacttatgtgtctgtatctatgttgattcatttataatcagaacaatattcccttctattttattcctaattcaaattgaaatctatagctgatatcactgtgatattctagctaatttttaaaaagtcatgtaaaattgatataaacattagtgagtataaaaggagtttgcaatgaattattcatctcgtcaacagccggataagcattggcttcgcaaagtagactgggtattagtagccactatagctgttttagcaattttcagtgttctgcttattaactcggcaatgggcggtggtcaatacagtgctaatttcggtatcagacaaattttttattacattttaggtgcaatttttgcaggtatcatcatgtttatttcacctaaaaagattaaacattatacatatttattgtatttcttaatctgtctattattaataggcttgctcgttattcctgagtcacctattacacctattatcaatggtgccaaaagttggtacacgtttggccctatcagtattcagccatctgaattcatgaaaattattttaattttagcattagcgcgtgtcgtttctagacataatcaattcacattcaataaatcattccaaagtgatttgttattatttttcaaaattattggtgtctcgttagtaccaagtattttaatattactgcaaaatgacctaggaactacattagtattagctgctattattgcaggtgtgatgttagtaagtggtataacatggcgtatcttagcacctatctttattacaggtattgttggtgcaatgacagtcattttaggtattctatatgcacccgcattaattgaaaatttattaggtgtccaactgtatcaaatgggacgaatcaattcatggcttgacccctatacatatagtagtggtgatggctatcatttaactgaatcacttaaagctatcggttctggacagttactaggtaaaggatacaatcacggtgaagtttatatacctgaaaatcatactgactttatcttttcagtgattggagaggaacttggctttatcggttctgtcatattgatcttaatatttttatttttaatcttccatctaataagattagctgcgaaaattgaagatcaatttaacaaaatctttatcgttggtttcgtcactttacttgtgttccatattttacaaaatattggtatgacaattcagttgttaccaatcactggtattccattaccatttattagttatggtggtagtgcgctatggagtatgatgactggaataggtatagtcttatcaatttattatcatgaaccaaaacgatatgtcgatttataccatccaaaaagtaattaatttaaactattttgagtttcaaatatcataacttttcaagatgacgttatatagtctatttacgtcgtcgatttaaaatgtcatatatagatattactcgataataacaatccctctttgaagtacacattgtaaaatgtacactctaaagagggattttgttatatagtacttgctttcattttagtaaatccagtcaaaaaagctatcatcgaatagtccgacgatagctttaacggtgtgtgattcacaatcacagtcaattattttaattcgtgacttactttattagatgctggcaaagtattaataatgtctaaacgagatttagtttttttaatattcacacctaatgatgacaatagtttgactacattttgaatcttttcaggacgtttcattattatcacctcgtttggatcgctttcaatattatcttaccctattcgacatacctttactacatcatttacaaaatttttaatttattttcaaaattaaaatctatagcgcactctacattataccctaaaatacaattttgtatccttcatcatagatttctttttcaatactattcaaatttgctggtgtctcatacgatacagttacttgaccatctattatattaatattcacttgatgaacacctatcatatttgaaatgcgttctgtcaattgacttacttgttcttctgtttcaattcccgctgtgtaaatcgtattttgatgtatcatcttaaactcctttagtctttaatcaatttttgaaaagtcactaataactcttccattgcctcttcctgagcaccttgattaactttattcataatacaacttttcatatgttgttctaataactttatcgcaacactgtttaacgccgaacgtgtcgctcttatttgcgtaaggacatcatcacaatagacatcttcttcaatcatgcgattaatcgctctcacttgtccttcaattcgatttaaacgtgatttaagattcgtttttatttgttcagaatgatgtgcattatcttgttcagtcatagcattcactccttcatttacattccttactatactatatcccataaaacacaacgtcaacacaaagtgtgtttttcaaactaaattgtcatgatatttaaattgcttcatgatacaattaataagatatactactcgtttaagattttcgatgggaggtttcaaatgatagagttattatccattgcactcaagcattctaatattattttaaattcaatatttattggtgcatttattttaaacttattattcgcctttaccattattttcatggaaagacgttctgccaattctatctgggcttggttactagtcttagttttcttgcctttattcggcttcattttatacttactattaggacgacaaattcaacgtgaccaaattttcaaaattgataaggaagataaaaaaggattagagttaatcgttgatgagcaattagctgctttaaaaaatgaaaacttttcaaattccaattatcaaattgtaaaatttaaagaaatgattcaaatgttgttatataataacgcagcatttttaacaacagacaacgatttaaaaatatacacagacggccaagaaaaatttgatgacctaatacaagacatccgtaatgctactgattatattcattttcagtactatattattcaaaatgatgaattaggtcgtaccattttaaatgaacttggtaaaaaagcggaacaaggtgtagaagttaaaattctttatgatgacatgggttctcgtggactgcgtaaaaaaggcttacgcccgtttcgcaataaaggtggacatgctgaagcatttttcccatcaaaattacctttaattaacttgcgtatgaacaatcgaaaccatcgaaaaattgttgtaatagatgggcaaattggatatgttggtggttttaatgttggtgatgagtacttaggtaaatcaaaaaaattcggctattggcgagatacgcatttacgaattgtcggggatgcagtgaatgcattgcaattacgatttattctagattggaattcacaagccacacgtgaccacatctcctatgatgatcgttatttcccagatgtaaattctggtggaacaattggcgttcaaatagcttctagtggtcctgacgaagaatgggaacagattaaatacggctatttgaaaatgatttcatctgctaaaaaatcgatttatattcaatctccctatttcatacctgatcaagcctttttagattctattaaaattgcggcattaggtggtgttgatgtcaatatcatgattcctaataaacctgaccatccgtttgttttttgggctactttaaaaaatgcagcatccttattagatgccggtgttaaagtatttcactacgacaatggctttttacactcaaaaacacttgttatagatgatgaaattgcaagtgtgggaacagctaatatggaccatcgcagtttcacattgaatttcgaagtcaacgcttttatttatgaccaacaaattgccaaaaaattaaaacaagcttttatagatgatttagcagtatcttctgaattaacaaaagcacgttatgctaagcgaagtctttggattaaatttaaagaaggtatttcacaattattgtcacctatcttataaaatagaaatatgaggagtgtaactttaatgcaacaatcagacgtcattagtgctgccaaaaaatatatggaatctattcatcaaaatgattatacaggccatgatattgcgcatgtatatcgtgtcactgctttagctaaatcaatcgctgaaaatgaaggtgttaatgatactttagtcattgaactcgcatgtttgcttcatgataccgttgacgaaaaagttgtagatgctaacaaacaatatgttgaattgaagtcatttttatcttctttatcactatcaaccgaagatcaagagcacattttatttattattaataatatgagctatcgcaatggcaaaaatgatcatgtcactttatctttagaaggtcaaattgtcagggatgcagatcgtcttgatgctataggcgctataggtgttgcacgaacatttcaatttgcaggacactttggtgaacctatgtggacagaacatatgtcactagataagattaatgatgatttagttgaacagttgccaccatctgcaattaaacatttctttgaaaaattacttaagttagaatctttaatgcatacagatacggcgaagatgattgctaaagaacgtcacgactttatgatgatgtacttgaaacagttttttacggaatggaattgtcacgactagacattgaagttgtagtatgatgatgcgatgtaatggcgtgttgttgtggaagcttggtgtcatgccatgttactttgatgtgttgttgtgggagcttggtgacatgtcatgctactttgatgtgctggtaccacgatgcgtcttgatgtagtgctatgatgtggcattgcggtgttatggtgttatagacaggtttggcgttgatgccatgttactttgatgtgctggtaccacgatgcgacttgatgtagtgctatgatgtggcattgcggtgttatggtgttatagaccggtttgatgttgatgccatgttactttgatgtgctggtgctacgatgcgacttgatgtagtgctatgatgtggcgttgcgctgttatggtgttatagccaggtttggtgttgatgtcatgccgttacgattctatgatatgttgttgggacgttgcaatgtgtattatgccgttgtgacgttattatttcacactgttacatgtataagtgaattgctgtggaaatttgcgacatatactgctacactgatgaatcattgtgtcaagatgacattgcgatgaagaatgacaactctgttattaaccactttttacatactgaaaactcgttaatattatttcaaataaaaacagcagtaggatgactttcacatttgaaatcatcttactgctgtttctatttatcacatattgtataatgtgacactaagtttcgctattgaagcgaaaaataatgtgcgccctataaagttaaaattatcttcaacttttagggtgcacattatttggacttgctaaggttatttctttttctttttagacacaacttgtgtgtttttgccttttttattgctgccgccgttgtgctctctttcatacgcttcaatgaaaggttgtacttcttttttagcgactttttcataataaatgttcgcaaagtgtgtttgaactacaaggaacgccgcactgactgaccagtacaaaccaagtgctgatgctgagcttaatgaaatccagataatcataattggtgaaatgaccatcatcatgtaacccatttgacgttgttcgtctggcatcgttttacttgatacatatgcttggataaagtataaaacaccggcaataattgtaatccaaatatcaggacgtcctaaatcgaaccataagaagtgtggatatttaaacaaaccatctacaagttggtctttaagtacaaagtataatcccatgatgattggtaattggattagcattggtaaacaacccaacatactcttaatcgggttcatgtcatactttttatatacttgcattaattcttggtttgcagccattttttcttcttgtgtacgcgcacgtttcactttttcttgaattttttcaacttctggctttgcaactttcattttttgacgcatcatatgactatttttatagtttgacaacatgaatggtaataaaataatacgaattaccaatacaaggataataatagctaaaccataattgtcgtttaataagttatttcccaaccaatccaatacatttttcattggatctacgaatgtattgtagaaaaacccactacgtttttcaggtttagaatagtcacaaccagccaaaaagaccataatacctaaaaataatggtagtaacgcttttttcttcatttttccacctctatcattatattcacataggatttattctatcacattaatgagtacgtatgaaacaataagtggaaaaatttaactaattattaaaaaaatctttgaatcgattaacagtcttttcaatattttcacttttagaaatggctgaaatgactgaaattccattggcacctgcttctacaatcggcgccacattattagtattgataccgccaatagctacaatcggtagttgcggattcatttctttaaacgttgcaatcatttctggacctactggtatatgcgcgtcatgcttcgacggcgtaggatagattggtccaacacctatataatcaacatgagttaaatcagattttgcatactcatctaaatcactaatactaagtccaataattttatcagtgaaatattgtgctatctctttgactttcgcatcatcttgaccgacatgtataccatccgcgttaatttcttttgccaaggatacatcatcattaacgataaaaggcacatcatattgatgacagagatgctgtaattctttagctaatacaagtttatcgtttccttttaaagctgattcacccttttctcgaaattggaaaagtgtaatccctgcctttaatgctgcttctaatacttcatgaatagttcgatgactcggaacatcggaggtcccacaaataaaatacacatttagatacgattggttaaacatattattccacctcttgaatacgaatccgttgttgataggttgtttcatttaaatgatataacgtatcaagcaacaatggtgaaaacgtaccaggaccaccacaattttcattttcagcagctacctcagcagcaatattaaatacgcttaccgcttcaattaacgcttctatgtctggttctgtttctctaaataaaaatccagcaataacgcctcctaataaacaaccagctccagttactcgtgctaataatggagatccattagctaatacgaaggctttattatcttgaacaataacgtcctctttacctgtgattactattgcagttttatatgttgcgtaagcctttttcgctattgcaaccgcatcaagattagcatcactatctgtacctttcatagttgctgtatcatcaatcaacgctaatatttcagatgcattgcctttaattactgatactttcgctgatttcaataataatttacaaaattgctttcgatatgtagaagcaccaacagctacagggtcaaatacaataggtaagcctgcctcatttgccgtttgagcaatcgcaataatatcttgttcattttctgctgttaaagtaccgatattgattaatagcgcttgtgcaactttgtaaaattcttcagcttcttcgggagcttcactcattgcagggctagcaccaatacttaataaaccattcgctgtaaaatttttaactacatcgtttgtataacaaattgttaatgggttttcaatacgtattttatttagataattcatcgtctaatccctctttctttaaatatgcaaaatgattcactggacctctaccacggccgatttcaggcgtatattgtatactcattgaaataaactttttagccttgtgtacagcctcaaataatggtctaccttttgcaagttctgccgttataactgctgaaaatgtacaccctgttccatgcgtatgttttgttttaaatcgttcattttcaaatgtttgaacaccttcgttagtaaataaataatcttttgctatatcagtatcatttgaatgaccgcctttaatgatgacacctttactaccaatctcattaataaagatgcggccagcctgcataattttttcttcactatcaatggttagtcccgttatttcttcagcttctggtaaattcggtgttactacgtcagctaatggcaataacgtatgctgcaagttttgctttgtgtcattatccattaatgaatcaccgcttttcgccaacataacaggatcaattacatatggaatagattcatgttgcattaaataatgacgaatcgtttccatagtatctgctgtagcaatcatccccgttttaatagcatgaggtaaggtatcattgaagacactatcaagttgttcatctacccattgatgatttaaattatgaatatgttgtacgcccaatgtattttgagcaacaatacttgtaacgacgcccataccatatacaccacatgaatgaaatgattttaaatcagccattacgccggcaccacctgttggatcagtacctgcaatggttaatgctattttaggtttaatcatttacttttcctccaaattcccattgttctagtgtcatagccatattgaaaaatcgacgctcatgtatgcaactttctaaaaatacttgctttacttgttccaattccttgtcagacattgattcggctaatttattcattaatgcctcaaatacgttaattatgtcatccatttcagtactataaaaatcaaaccattttgccgtatctttttctctattaagcttatgatcactttgagagcgcttagctaattctgcataaatatatggacaaggtgccattgcagcaattgtataaatagcattttcacgactatgcgcttggaaatacatatgttttatgtaatggtcgccacttggaggccaaacttttgttttaatgatttcttcgtatgattcaccaacaatttgcgctaaaatatcatgcgcaagtacttcaccttcaaccataaattctatttgctctactaaaaattttacgtcattcatgctattcatttttggaattaacaaagcatataagtttgtaaattcttttaaatacgcagcatcagcttttaagtaatggcgtaatgcgtcagctcctatatctccggataacatcttctgaataaagtcatcctcataaatatcattaatgattggctttgcagcttggtacaatttttgtgaaaattccattgtaaaaaatcctccctaaataaaaaaactacttccaacatgaaagtagtttgatggcaatgttgctatactagccccatcacttcaataactactttcctacgttggtactaaccaaatcaggtcataagggtctgaacaattcatctcagccatatcattaggctcccctagtagttccttagtattcaattgcaaattaatcttagcaaacggtttcaacattttcaattattgttgctcagttgtattattatctttaaataataattctataatgacatatatttgcgaaataaaaaaaccggaacatatcgagaattccccgatatattccaatctaaaagttacttatataactattaattagctatgcataaatggcttatgcagtaacccaatgtccagcgccaccagtgttatataattttactgctgcggcatcttgaacactttcaggagcatttgctggtgatacacctttatatttagcaggtgctactgaatcccaagttgattgtaagaattgatacttaccagctgcacctgatgttggatttacagcatgaatattgccacctgattcacgttgagcaatttgttttagatgagcattcacatttactgatgaaccttctgatgattttgattcagttggtgttgcagtaacttgtgaattgtttgatgttgatgcttgtggttgttgagtttgagcattttgtggtgcttcaacttcttgtgattgtacttgattagcttgaacagctgatggtgcaacattattagttgcaggtgcttgtgcactcatgtctgctccattagtacctgttgcatggtaattccaagcaaagtgtgtaccatctgattcaaagtgataagtaaacccttcatagtcaaatgtataattataagccccagcttcaattggtttttgatttaatgtttgatcatttgattgcgccatttgcgctaaagatgctttatttaagtccgcttcacttgcatgggcttcgtgacctgcatttcctgctacgattcctaaacctactgctaatgatgatgcgagtaatgttttcttcataatcttaaaatcctcctacaagtaatttgtttctctaaaagttttacagagactactgtaacatctataaaatccgtgcaggttacaacaaaataaaaaaatagccttgttttttacacagtgattacaacgaaatcccccataatttcagatatgattctatcgagaattgtcatgacagtaaaaatgtttttttatttgcaattttttatgtaatcgttttgcaatctatgtctattttctattagaaaaactacacaaaaagacgacctacacaacagtactagtcatgtaagtcgtttttaagtgagtatatttcaagttaattagatctataaaaaatttaggatggattaaatgtatattaaggatgtttaggataattggatttaaatttctaataagtcatgattatctatattttgagagtcaatatctaaatactatctgagagaatttcattattttgggatttaggggacataaattttattgtttcaacatataattcagtgacaaagtgtgtttgtccgtctttatcatactttcttgatctcatttgaccagttataccaaccaatgtaccttgattagtatatttttctatattagaagctaacttgccaaatgctttacagaataagtaatcacagacgatttctccattttcatctttataatttcggtgcgttgcaacacaaaacgttgcaatttttctatcctccttttcaaatatttgtgcgtctttcgtcagtctcccgacaattacgattttatttagcatgtagtgtgtgattcacctcctatgcctatatcttaattactagcttaaaaatggtcaaaatggcaaattttatataattaatagctatagcatctcgttatttgttatatttaaagaaattagtcatgaaatgaccttaaatcttctaaataattcaaaaatcataaatattaaactaatgggatgtgggaatatgaaaacttttaaagcagtaaggtttcaaattgtgaatgaacacggcagaattatagaatatgaattagaagatggcgtaataattaataaagaggaaagtggcacgggttggttgcttgaaattgtcatttctaatgagcattatgaaacatttaaggaatatcaagacaatgaacagttattggatattcgtgtcgtcatcacgcgtccagccaatgatccagctttatttgaatctactgtgaaaagtattaaaaattttaaaacaacaatgtctatcgtatttgaatgtcatatttacactttacgtcaacagtatgctgaaagtttattagaacaacttattgatgatggattatctggtgaagaattaaaaaaatcatttaatcgaatgatgcagtctaaaccaaagttaaaggatgaaaaattagaagagtaaaataaaaaacattcaaagattatgccaacacattaaatctttgaatgttttttttgttttattttacatcttgaattgcaaatgtaagttcacaactacaagcaagttgaccatcgacagtagctttagcattacctttacctattggtcctttaattttagtgatttctacttccaacgttaaagtatcaccaggtactacttgacgtttaaaacgacatttatcaataccagcaaataaagcgattttacctttattttcttcactatttaaaatagctaccgcacctgtttgagctaacgcttcagtaattaatacgcctggcattaccgcatactcaggaaaatgcccttgaaagaatggttcgtttcctgatacttgtttaatagccacacaacgttgaccttcttcatattcaactactttatcaattaataaaaatggctgtctgtgaggtataatttgtttaatttggttataatcaaaaattgtttccatggttgaaatcctccattatattaatttactgaattaatcgttaatacgttcaatgtctgcacctaattgcttcaatttaccgtgtaagtcaacatagcctctatctaggtgcgttaattcagtaacgcttgttttaccatcagcaactaatccagctaaaattaaggcggctgctgctcttaaatcagtcgctttaacttgtgcaccttgcaattgacttttaccttcaagtttagcactacgaccttctacattgatattagcattcatacgtttgaactctgcaacatgcataaaacggttttcaaaaacagtttcggttacgactttatgaccatttgccgttaataacaatgccatcatttgtgattgcatatcagtcgggaatccaggatgtggtagagttttgatgtctacaggttgtaattccccttcagcacgtacacgaataccatcttcttgatagtccaattcaacgcccatttcttctagtttatagactaaactcgccatatgttctttgattgcatcacgtacaaaaatatcaccacgcgttatagcaccagcgattagtaatgtgcctgcttcaattctatctggaatgatagcatgttctacaccatgtaatgattctacaccattgattgtaattgtgtctgtaccagcaccagtaattctaccacccatttcattaatgtagtttgctaaatcgacaatttcaggttctttagctgcattttcaattaaagtcttacccttagctaatgatgctgccataataatattttgtgttgctcctacacttggaaaatctaaatgaattgatgtaccttttaatccatctttagcattagcataaatattaccattttcaagatgaatttctgcgcctaaagcttcaaaacctttaatgtgttgctcaatcggtctacttccaattgcacaaccaccaggcaatgcaacaatagcatgtcctagtcttgctaaaagaggtcccataactaaaatacttgcacgcattttactaacatattcatatggtgcctcttcatttagagtctttgttgcatcaacgacaacagcattttcgtcctttttgtatgtaacgtcagcatttaaagttgttaatacattatttattgtttctacatcacttaaagctggaacattaactaatttgctcggtttatcagaagctaataaagatgctgtcaatattggtaatactgcatttttagcaccttctactttaacttcacccgttaatttatttccacctttgattactattttatccatcgtaaatcctccacttagaactcctattactttacatttccctattttaaaattattttaagtcattatttaattatatctagttttgattacaaatcatagagttagacttattttattaaatattttacctgcgtcgagtattgtaacaaatctacaataaaattgcttactgcagtgcctaataaaatagcaacaaatatcatacacacttgtaattgagtggcgtatccttttttaaaaaattgatctaatctaattgattgtaaagcccaataggcaatacaaatacatacaacatgtaacactaaatggataactgcatattgtccgatataatccattttatcacctcataagattactgtattacattgtacatgaaaaatttaaataatgatacaaagtttaatacccgtttttagtaaagtttaagctaacttactatataattctttttacataaatatcataactataaaatatcttggtatgaaaaaatgtagataatttcaaaaaatgaaatgtcgactgtagatagtggtgaaggaaattttgattttagcaatctattagtgattgtaaaaaagtaaaactattcttgggagtcggacataaatcaatgtctagactctatagtgttgtatttggcagtagttgacggggccccaacataaagaaatactttttctttagaaattagtatttcttatacatgagttttactcatgtattcctatttttaaatacacattagctgtgtttaatgataaagaaccactacatcataaatctttaatggttctttatcaattccttcccccctctcatgttttgtatctttaaatcaatataattcaaaaaagggtcgaagatatgaaatcacatcttcgaccctttatttactattttaattcagccacacgcaaacggttatttgctctctctaaagctctttcggctctatgaatatcagtattgtcgtcatcattttccaagtgagactctgctcttgctttggctaatttagctctttcaacatcaatttctcttgcagtttctgcagtctgaacaatgattgaaactttatcttttctaacttcaacaaagccatcgcttacagcaatatattcagttccatcgtgaaatttcacttttacaaagcctgtttttaaagcagctacagttggaatatgtccactcatgacacctatctcaccagctgttgtttgcataacaacgagttcaacattatcacgattgtaaacagaaccattaggagtgacaatatctaggtttaatgtattcattatccattcctcctaattgttatacttcaacacccatatctttagcttttgcaataacatcatccatgctaccaactaaacggaatgcatcttctggaatatggtcatatttaccatctaagatatctttaaagtttgcaactgttgtcttaacaggtacataagaacctttttgaccagtaaattgttccgctacgtggaagttttgagataagaagaattgaattctacgtgcgcgttcaactgtttgtttatcttcatcagataattcgtccatacctaagatagcaatgatatcttgtaattcacggtatttttgaagtgttgattgtacatcacgagctacttcataatgttcttgacctacaattgatggttccaatgctcttgatgtagacgctaatggatccacggctggataaatacccatttcagttaatttacgttctaagtttgtagttgcatctaaatgggcaaacgctgtcgcaggcgctgggtcagtatagtcatcggcaggtacgaataccgcttgaatagaagtaactgatccttttgttgtagacgtaatacgttcttgtaattgtcccatttcagtagcaagtgttggttggtaacctactgcagaaggcatacgacctaataatgcagatacctcagaaccagcttgtgtaaatctgaaaatgttatcgatgaataataatacgtcttgaccttgttcgtcacggaaatattcagccattgttaaaccagataatgcaacacgcatacgtgcaccaggtggctcattcatttgcccgaataccatggctgttttcttaattacaccactgtcactcatttcgaagtataaatcgttaccttcacgagtacgttcacctacaccggcgaatacagaaataccaccgtgctcttgagcgatgttgttaattaattcttggattaatactgttttacctacaccggcaccaccgaacaatccgattttaccacctttaatataaggtgctagtaaatctactactttaatacctgtttctaaaatttgaacttctgttgaaagttcatcgaatgctggtgcttgacgatggataggatcgcggcgaacagaatcactaatttcttctttaaggtcaattgtttcacctagtacattaaatacacgacctaatgtttcgtcaccaacaggtacactaatttctttgcctgtatcttttacatccatgcctctttggacaccatcagttgaatccatcgcaattgtacgaacaacgtcgtcacctaattgcagcgcaacttctaatgttagttgtattgtaccttcttctttaggcacatcaataaccaaggcgttattaattttaggaacttcgttatgttcaaatcgaacatcaattacaggacccataacttgagttacacggccaattcccatgctattttcctcctttaaatattattcaagcgctgcggaaccaccaacaatttcagtaatttgttgcgtaatttctgcttgtctcgctctgttatattctaatgataagtcatcaataagttcagttgcattatcagtggcatttttcatcgcagtcatacgtgttgcatgctcacttgcttttgcgtctaatattgttccgtaaatcaaactctcaacatattgaggcaagattacacttaagatagattctttatctggctcaaattcataagaagacaaatgaccatgccccttactagaatcctcttgagataatggtaatacttgtctagatgtaggcttgttttcaagaacgctgacataatgactatagtatatatttaattcatcaatttcttcttcactgtataagtctatagcatggttagctagtgcttgaacagatttgaaagaaggttgatcaggtacgtctacttgagaatactcaatgtcataacctctattttttaggaaatcaacaccttgttgccctaaaactacaatactgtattcgctactatcttgatgtttcgcttcaatatcagtaatcaattttttaagcacgtttgcactatatgcacctgctaaacctttatcactcgtgataactaaatatccacttctagtaattttacgaggtcttagcattggatggtttgtattgctacttgcccctgcaactgcagtaattgcatcttgcattttatccatatatggtgtgaattgttttgtatttttttcagctctacgaagttttgaacttgataccatgttcatcgctttcgtaatctgcttcatttttttggttgattttattcgagtatctatttctttaagagaagccactatctcaccaccttatactaaacttgtttattattcagatttgctaaagctttttttgaattcgttaattgctgtgtcaaacttctcagcatctggtaagccaccagtttctctgatttcatttaacagttcagtagcatttgattctgcccagtggtttaactcgtcttcaaaacgtgtgatatctacaactggaatatcatctaaatatccttttgttaatgcataaataatcaacacttggtgttcgactggtaatggtttgttttgatcttgttttaagacttcaacagtacgtttaccacgttctaatttacttgcagtaaattcatcaaggtctgaaccgaattgtgcaaatgattcaagttctctgtatgacgctaagtcaagacgtaacgtaccagcaactttcttcattgctttaatttgtgcagatccaccaacacgagatacagattgtccggcattaatcgctggtcttacacctgagaagaataaatcagattgtaagaagatttgtccatctgtaattgaaataacgtttgttggtacataagctgaaatatcaccagcttgtgtttcgataattggtaatgcagtaattgaaccgccacctaagtcatcgtttaattttgctgctctttctaataatctactatgtaagtagaatacgtcacctgggtatgcttcacgacctggaggtctacgtaataataatgataactcacgataagctgctgcttgtttagttaaatcatcataaacgattaaaacatgtttaccgttaaacatgaattcttcacccattgttacacctgaatatggtgcaatatataataatggagaaggttcagaagctgatgctgctacaacaatagtgtagtctaaagcgcctgcttgtcttaacttttcaacatttgctcttactgttgaatctttttgaccaatagcaacatagatacaaatcgtaccttgatctttttggttcaaaattgtgtcaattgcaattgttgttttacctgtttgacggtcaccgatgattaactcacgttgacctctaccaattggtactaaagcatcaattgctttgatacctgtttgtaatggctcatctactgatttacgatccattacaccagtagcttttttctctactggacgtgttttagttgtgttaatcggtccttgtccatcaataggttgtcctaatggattaacaactcttccgattagttcttcacctactggtacttccatgatacgaccagtacgtttaacttcgtcaccttcagtaatacctgtgtatggtcctaaaataaccacacccacgtttgactcttcaaggttttgggctaaaccaagtacgccgttatggaattctactagctcaccagccataacgtcatttaatccgtgaattaatgcaataccatcaccaatttgtaatacagtacctacatcagttacggacatttctgactcataattttcaatttgtgagcgaagtaatgcactgatttcttcagcttttatggccatctatgtcactcctctttataattaattaactcttctaaattttctttgtaattggacaagatcatttctaacactaccatctaatacagttgtgccgactttaactctaaatccaccaattaaatctggattaatttttgtatctacaataactttagataacttcgtttgttgagttactagtttgacaatcttatctaactcttcttgactcaattcatatgttgactcaattgttgcaaaatcttgattgtagtgtccgttatataagctttggaacgccttgaatacgtcagctattaatgagatatgtctattatctgctaacacgtacatcatatttttaatgtatggattaatgtcagtaaatacaccattaatcaactcacgacgttgttctgctgtttgagttggattactgtcaaccattctcaattgctcaattttatcttttactgcttcatttataactgttaattcttcattaatagtctctaaattatttgtatctaatgacacgtcaaataatgctttagcatacttgttagctacttttaccattatttatcgcctgcctcttttagatacttgtcaaccaatgctttttggtcttgttcagaaatttcttttctaagaactttagaagcaattaacactgatagttcagatacttgattattaatatctgcaatggcacgttctttttggctattgatttcactttgtgctgtttcaatcataccgtttgcacgtacgtttgcttcatgaataatttgttcttgctgttgacgtgcttgaaccttagcatcttctaaaatcttttgaacttcttcttgtgtttctttaagtttttgtttattttcttcttcaagtttctgtgcatttaacttagcttgttctgcgtcatcgatatctctgttaatatctctttcacgtttatccattacatctttcaatggaccccatgcgaactttttaagtaacgcaagtaacacgatgaaagttaggacctgtacaatcacagtaccccactcaacgcctccagctgcaccaagaacgaataagttagctgtttcagtcacgggttcatgacactcctttcattaaaataatcgctagtgttatatagaaaaaaacgacgaggttaggacctactgaatttatgcgataggcatggtgcgttcatatctcaactatttaataaagttcaaagatattactatatatgcatcatgaattatgtcctatgcgctttgtcccgacctcttttatctgttaattatccagcaaatgtcatgaatgcaattactacaccgatgataggtaatgcctcaactaaacctacaccaatgaacatgatacccattaattgaccacgtgcttctggttgacgtgctacaccttcaactgttcttgaaacgattaaaccgttaccgatacctgctcctaatgctgataaaccaattgcgattgctgctgcgattaaattcataatttaatttcctcctgtgattgtatataattattgaaatttttagtgttcatctgccactttatgtgacatataaaccatcgaaagcataataaagatatatgcttggattgttcctacaaatattgaaaatgcttgccaaacaattaatcctgggatactaataatccaaccccatgctggttcgttaaagaataagccagcaagtaatgttaatagtatctcacctgcaaatatgttaccgtacaaacgcagaccaagcgttaatgttgaagtgaactcttcaaaaacattaataattgccaatggccaaaacggctgtacataacctttaagatattgtttcgtaccacgcattttaattccataaaagtgagttaacagtattatcgttgtagacaacgttaaagtcactgttgcatcagctgtcggtgatttccaccacaatgtgtgatctttcgttactatagaaaacggaagacctaacatattagctataaaaatgtacagaatcagcgttactgctaagaagtggaattgaccaccttttttccaagccatgttaccttcaatgattcccctcacgaaatcaaaaatccattcaacgaaattttgtttgccagttggtctttttttcaaattacgcgtacaaatgatagcaagtagaaaaacaagaaacgccgtaacaagtatcatcaatatacttgataaattgaaaacgatatcaaaaccgaataaattccaactcacgagcggggatttgtgatccataatctcacctctttcttaatttatttgctcacctttagtaaaggacgtatgataactacaacatatgaaatcattaaaccaataattataccgatgatacttacatgcgctttattaaggtaccaaatcatacaggcaataattgcaactaagtatcgccacatatttccagttgaaatatgcatagtgtctggtcttttagctttagctaaatagcattcaaaaatacatgtgttgattgcagaaccagtaacaccaatgattaatcctaagataaatgcatggtgtgtataaaggtataatcctcccaatattattattagataaaaataatattgaatgaactgtttaaaaatgttgtagaaacgactcattttatatgcctccgtgtgactgatatcaatcatgaaaaccgttccactcatacaaactaaatgataatataggcgatttgtggtgtcaattctattcaaattgttgtaaaaaaataagcatagttagacacaatttagacacaattagacaaaaagtctattttcctcagaaatcgcttggtttttcagtgattaaattcaaataatacttaatatgattaactattctttctgaagcaaatccatcaccgtaaggattagatgcttcagacatttgatgatataatctctcatcatcgattaattcttttgcagcttgatacacattttgcttatttgttccaatgacttttaatgtgccagcttcaacaccttcaggacgttctgtaacacttcgcaaaactaaaactggcttattaaatgatggcgcttcttcctgaattccacctgaatctgtcaaaataaaataagattttttagcaaaattatggaaatctactacgtccaaaggttcaatcaattcaattctgtcatgactacctaaaatcttttgagccacctctcgaactttcgggtttttatgcattggatataccagtgctaaatcagtatactcatctattaagcgtctaaccgctttaaatatattttccatgggtttcccgatattttctcgtcggtgtgctgtcataagaatgaattttttgtcatggtatttatccatgatgttagatttataattgtcatcaactgtatatttcatagcatcaatcgcagtattaccagtgacaacaacactttctgaatatttcccttcacttaacaaatgcgatgcagcatttttagtaggtgcaaaatgtaagtcagctaatacaccaactaattgtctattcacctcttctggaaaaggtgaatatttatcataacttctaagccctgcttcaacgtgtccaatcggcacttggttataaaatgccgctaaaccacctgcaaatgtcgtcatcgtatcaccatgtacaagtaccatgtctggtttttctaattgaatcacttgttctaattgagtgattgatttagaagttatctcagaaagtgtctgtcctgatttcataatattcaaatcgtattttggtttgatttcaaaggtacttaatactgaatcaagcatttctctatgctgtgctgtaacaacaacaattggctcgagcattttttcttgttccaaagctttaactaaaggagccatctttatggcttcgggtcttgttccaaatatggtcataatctttttcatcaaactacttatctccgattcttctatttagtaccaaacaatctatctccagcgtcgcctaaccctggtgtgatatatgctttgtcatttagcttttcatcaagtgcagcaatataaatatctacatctggatgtgcttcatgcatcttttctacgccttctggtgctgcaattaaacacatgaagcgaatatttttagcgccacgtttcttcaatgaagtaatagcttcaattgctgatgcgcctgttgctaacataggatcaacaacaatgatttgtctttcagtaatatcttgaggtaacttagcaaaatactctacagcctttaatgtttcgggatctcgatataaaccgatatgtccaactctggctgcaggtactaaacttaaaataccatcagtcatacctaaaccagctcttaaaattggaacgatagctaattttttaccagctaatcgtttagccgtcattttagttacaggcgtttcaatatcaacatcctgaagctctaagtctctagttacttcatatgccatcaacataccaacttcgtctacaagttctctaaattctttagtacctgtatttacatctctaatatagcttagtttgtgttgaattaatggatgatcgaaaacgtgtactttactcataaaaattactcctatctttgtgtatgtttattgatatagaggatattcagctgttaatttcgcaacgcgttctttagcttgttgtaatttttcttcatctttactatttttcaatgctaaactgatgatttttgcaacttcctcaaaagctttttcatcaaatccacgcgttgttgcagcaggtgtacctaaacgtataccactcgttacaaaaggtttttcttgatcgaacggaatggtatttttgttacatgtgataccaactgaatctaaagtctcttcagcttctttaccagtaagtcctatagacccttttacatcaacagctactaagtgattatctgtaccgccagaaacaattctaaatccttcattaattaatgcttctgcaagaacttttgcgtttttaaccacttgttgttgatacgttttgaaattattttctaacgcttctccaaaagcaactgcttttgctgcaataacatgctcaagaggtccaccttgaataccagggaaaattgttttatctatgtcttttttatattcttccttacataaaatcataccaccacgtggtccgcgtaatgttttgtgtgttgtagttgttacaaaatcagcatattctactggatttggatgtaaacctgccgctactaatcctgcaatatgtgccatgtctaccattaacttagcgtttacttcatctgcgatttctttaaactttttgaagtcaattgttcttgaatatgctgatgctcctgccacaataagcttaggcttatgctctaacgctaatttacgaacttcatcataattgattcgttctgtgtctttatctactccatattcaacgaaattgtagaatttaccactaaaattaacaggcgctccatgtgtcaagtgaccaccatgactcaaattcatacctaaaactgtgtcgcccattcctaatgcaactaagtaaacagccatgttcgcttgtgaacctgaatgtggttgaacattgacatgttcagctccaaacaatgctttagcacgatcaattgcgatgctttcagtaacatctacaaactcacagccaccataatatcggcgtcctggatagccttcagcatacttattagtcaacactgaaccttgtgcttccataaccgcttccgatacaaaattttccgatgcgattaactctatgttgctattttgtctctgaaattctctctcgattgcttctgcgataactttatcttgcttggtgatataagacataaaatctccccttctttcaaaaaaacttattggtatttagcacgttcgccaccaatctttttcggcctagatgtggcaatagttacaattgcctgtcctacttgctttactgaggtccttacaggtacacatacatgtttaatatgcatgcctattaacgtttgaccaatatcaattccacaaggaacagtaatatgttcgaccacgatcggatccttcatatgctgaaaagcgtatgttgccaaactccctccagcatgtacatctggaacgacggaaacttcttccattgttaatggattatactgagatttttctattgttatcgctctgttgatatgttcacatccttgaaaagcaaaagtaacgcctgtctctttactcacaacatctaatgcattaaaaatagtttctgcaacttccatcgaaccgacagtccctattttttcgccaatgacttccgatgttgaacatccaattaaacatatatctcctttattaaaaaaggacatatcttttaattcgtctaataacattgtcaaatctttcataaaagcccacccttcctaaaaataaaaaaggaatatagcaaagtgctacactcctctattataacttatttaactgttaacatatactaattatacagaattcctactagcaaataatatcttttaattttaaaattaaacttacaagttcttcataggtatgtacatacatttcttttgttccaccgtatggatctataacttctcctgcttcttttacatattcatgcaatgtgaaaacatgattttgcaaaccaaagtgtgcctctattaattctttgtgcgaatacgacatcgtcaaaataatatctgctttcaaatctgcttcagtaaattgttgcgataaggtcgtttcagctaaatgatgttcttcaactaagtcttcaacataattcgaaacaccttgattgttcacagcgaatatacctcttgattcaaattgatgatttggcataacctcttttgcaatactttccgctaatgggctacgacatgtgttacctgtacaaacgaataaaatcttcatagttcacatcctttaataatgtgattacctgcagcttttaacatgcgattcataattgcttctgtattatcattcagctcaaagccgtatatatacgccgctgaaatattttcattttcatcaagtgaatgtaacacatcataaagattatgacttgcttgtttaacatcattgtcatcctgacataattgaatgaattgcgcttcacttggtataaacgccaccttattactcggcacaataaaagctatagaagaccaatctttaccgtcatttccaattttgctctcaatatctgtaataattgtaagtggtgtattgggtgagtaatgcttatacttcatacctggtgcaattggctgttcagtatcattataatcagcatgggcgatactattcggaagtatttctgtaatcattgctgctgttatagaaccaggtcttgcaattttataaggaaaagatgtgcaatctaaaaccgtactttctaatccttcttcactttgttcagcttgaacaataccatcgatacggccattcaaatcttgatatacatgattgaaagttgttggtgaaggtctaccacttaaattagcacttggagcagctagaggttcatttatgatttgtaataattgtctacctacagaatggcttggcattctaacagcaactgatgataaacctccagaaacttttcgacatagatagcctagctttaacggcaatataaacgaaatagggcccggccagaatgcctgcattaacttttctacgcgtggatccaaagtatatgtaaaatcttttaattgacctttactgtgtatatgaacaataagcggattgtcagatggacggcctttagcttcatatattttagctacagcttcttcatctgtcgcatttgctgcaagtccataaactgtttcagttggtaaacctattaaaccaccgtttaaaacaatgtcttttatttcattaattttaggatattgctgtaaatcttcattatattctctaacatcccaaattttagtatccaacttaatcacgcctttcttatttatcataatataaagcaaaaagctatgcacttaactaatcatagcaaaggcataacttctaattaccatttaaatgagacgattcgatcgtggccatttatatctttaataatgtcgatttttttgtcaggaaatttatttaaaattattgatttaagtgcctcaccttgattgtaaccaatttcaaaaacaactgggctgcctttttccataacgtgaggtaaatcttcaatgattgattcataaatagcatatccatggttatctgcaaacaatgcctgatgtggttcgaatctcgtaaccgttggagacatcgtaaccatatctttttcatctatatatggtggattagatatcaagccgttcaacttgataccttcattaattaagggctttaatgcatcccctgttaaaaattgtatttgtgattgatgcttctcagcattattacgagccatattcattgcttcaagtgaaatatcagtagcaataacatttaaatccggcttttcacatttcaaagtaattgcaagtacaccactacccgttccgatatctacgattgttgcatcatcttctaactgttgtaagaaatgcaacattacttcttcagtttcaggtcttggtatcaaacaatttgagtttacatcaaacgttctaccataaaatgaggcaaagccaactatatactgtataggctctcctaataacatacgttgtaatgctaagtcgaacttcataatcatcgctttcggcatatcatcatgcatgtggactacaaagtccgtacgcgtccattgaaatacatctaacattaaccattcagctcgtgtttgttcaaaccctttttgttgtgttaaatgaattgcttcatctaacttttctttataattcaccattattaagttctttcaatttatctgtctgctctgataaagtcagtgcatctataatttcttctaaatggccttccataatttgccctaatttttgaagcgttagacctatacgatggtctgttacacggctttgtggataattataagttcgaatacgttctgaacgatcaccagtaccgactgctgatttacgttgtgacgcatacttttgttgttcttcttgaactttcatatcgtataaacgtgcttttaacactttcattgctttttcacggttttgaatttgagacttctcagaagatgttgcaatgacaccagttggtaaatgggtaatacgtactgcagagtcagttgtgtttacgtgctgaccacctgcaccacttgaacgatacgtgtcgatttttaaatcttcatttctaatttcaatttctacatcttcaacttctggtaaaactgccactgtagctgttgaagtatgaatacgtccacctgattctgtttcaggcacacgttgaacgcggtgcgcaccattttcaaatttcaatttactatacgcgccattaccagaaactgagaaactaatttctttgtaaccaccatggtcactttcagacgcttctactatttcagttttgaatccttgtgattcagcatactttgaatacatacgcattaaatcaccagcaaaaatcgcagcctcatcaccacctgctgctgctcttatttctacaataacgtctttgtcatcattaggatctttaggaatcaataatattttaagctcttcttcaagatttggaagttcagctttaataccattactctcctcttttaacatttctacttcttctttatcatcagtctcacttaacatttcttcaatatcagctaattcttcttttttagctttatagttacgataaacatctacagttttttgtaaatcagcttgctctttagaatatttacgtaatttatctgaatcatttacaacatctgggtcacttaacagttcatttaactgttcgtatctttcttctacaatatctaattgatcaaacacttataattcctccttattattatcactaggtgctacgatatggtgcgcgcgacaacgtggctcataactttcattggcacctactaagataatcggatcatcgattttagctggtttaccatttattaatcgttgcgttctactagatgaagaaccacaaacagcacaaactgcttgaagtttcgttacttgttcactgacagccatcaatttaggcattggttcgaacggttcgcccctaaaatccatatctaatccagcaacaataacacggtgtccatctgctgatagtttttctactatacttacaatttcatcgtcaaaaaattgcacttcgtctattcctataacatcaacattagttaagtcgtgcgtcataatttcacttgctttagaaatattaatcgcttcaatggcattaccattatgagagaccactttttctttatgatatcgatcatcaatcgccggtttaaatacaacgactttttgtttagcgtatataccccttcttagacgtcttattagttcttcggatttaccgctaaacatactacctgtaatacattctatccaaccggaatggtaagtttcatacattgagagttccacctttttcaaaacataatcgctttattatatcatatttcaaatattcataaatgtctttttcataattatatcgatattgtacatgaacaattattttataaatttgtcttgcatatttatatacagctattctaatttgttgcttcttattcgtgcgatgtttctactcaatacaaactttaataaagggggaaatttatcattatgtattaacaacatggtattgagtcacttctttgaacacagtcgtaagtatatacccttactacgcttataaataaaaaagctgtctacaattccattataggatgcagacagcttaacgattactatattagttgtttgatttaagaccaaactttttgttgaaacgttccacacgtccatccgcagcagcgaatttttgacgtccagtgtagaatggatgtgaatcagatgaaatatctaaacgaataactgggtattcttttccatcttcccactccatcatttctgaagatgtttttgtagaaccgcttaagaatttgaagtttgtagtagtatctaaaaagattacttggtgatactcaggatgaattccttgtttcattattttcagctcctttgccctgaaccatctggaacagagttatttgtgagtttttacccaatactgtgtaattataaaggtaattaattcaaaacgcaagcccctatataatgtttattaaattataggtcgacccgttttagtactttcttctgcagacttttgtagctgcttgaagaaatcttcattattcttagaccttttaagtttgcgaataaatctttcagtaaagtcagttgagtcagtgaatagatttcttaattgccataatgtgtctaattcagatttacttatcaacaattcttctttacgcgttgaacttctgccaatatcaattgcagggaagatacgacgttcagacaatttacgatctaaatgtaactccatgttacctgttcctttaaattcttcgtaaatcatatcgtccatacgtgaacccgtatcaactaatgcagttgcaagtattgttaaacttccacccgcttcaatatttctcgctgcaccgaagaatgcttttggtttgtgtaaagatgcaggatctaaaccacctgataatgtacgaccacttggtggaataactaagttataagcgcgtgctaatctcgttatagaatccattaaaataatgacatcttccccaatttctactaaacgctttgcacgttcaagtaataattcagctactttaacatggtgttctggtggttcgtcaaacgttgaatgaacgacttcagcagcttctactgagcgttctaaatctgttacctcttcaggacgctcgccaactaacaaaataaatagctttgcatctggtttgttcgtactgattgcattcgctatttcttttaataacgatgttttacctgctttaggtggcgccactattaaaccacgttgacctaaaccaatcggtgttactaaatccatgatgcgcgttgaataattttgtgtttctgtctctaatttaatacgctcatctggataaagtggtgtcaaagcttggaaatgcggacgtttcttcacttcttctgcgttatggtcattgacaaagtcaacttgtaataagccataatatttttcgttatctttaggttttctaactttcccagttactttatccccacgtttaatttcaaaacgacgaatttggctagcagatatataaatatctttttcccctttagaatagttcactgttcttaaaaaaccataaccatctggttgtatatcatctaagataccttccatataatagttaccatctttttccatttgtgcttccataatagctagaacaagttcttttttatttaatttactatagttcgtcaacttaagagttttagctttttgagtgagttccttggtagtatagttcttgtacaattcgtggaatgattcatactgaggagatgtacgttctctttcaggcatatagtttacacccatttcattattttttagttagtaagtaatagataggcatgacaatgcataaataactgtgctagcacaatcccattatgctaatccccaaccttttaaatacatgaataactatagcaaatttttattttaattacaaaatctatttataaaaattgcaaaattaaaacagtacacaaaacttaattagtcatgtgcactgttttattgcgatttttaattcaaaaatcaaatttatttaaaatatccagctatagatttcacttctaagaactcttcaataccataatcgccccattcacgacctaaaccagattgtttatagccaccaaatggtaaatctggctttctacctgcttcgtttatttctactgtacctgcttcaatagaacgagctactttatgcaatgtttctttgtccttaccaataacatatcctgccaaaccatattttgtatcatttgcaatttgaatcgcttcatctaaatcgttataagtgataactgacattactggcccaaaaatttcttcttgtgctatcgtcatttgattatctacattaataaaaattgtcggacgtgcaaagtatcctttttcaagtccttctggtttaccaggaccaccataaaataattcagcaccttcttcaatacctttattaatataattttgtacttgatcaaattgttttttactaatgatagggcctacttgtgtaccatcttctcttggattaccgacacgcacttggctaaattgttcttttaattcagctaagaatgcatctttaattttgttaggcactaaaacacgtgtaccagctgtacatacttgaccagtattattaacaactttgcctgttgttgctttagccgcttctttaatatctacgtcatctaggacgatatatggtgatttgccaccaagctctaatgatacctttttaaaatctttagcggctttttccataattttagaaccagtagggcctgatcctgtaaatgacatcatgcgtactttaggatgttcagataaaggattcccaacaccagcaccatcaccattaacaaggttaaatacacctttaggaacaccgactttatcaaaaatctcagctaaaataacagctgcaaatggtgtttcttcagatggtttaagtacaactggactaccagccgcaaatgctgctgctaattttaatgatgtttggtttgtagggaagttccacggtgtaattaatccagatacaccgattgcttctttaacaactaaatcatctccgcggcgttcttcaaattcgtagttatctaatgcgtctctcgctgcaacaaaatggtttagtcccatttgataatggacacgctcagataatgataaaggagcacctaattcatccgtaatagcttgtacaatatcgtcttttctgttttcatattcttttacaattttatctaataacgcttgtctttctttcacagatgtatgacggaactctaaataaacatcgtctgccgcctcgacggctttatcaacatcagctttattacctttagcaactttcccgattacttcttcggttgctggatttataacttctatcgtttcattactattactttctacccattcgccattaatgtattgctttgtgtagtctctcattattctttcactcctcaagaatgatttatatattatttatccgtaatgcatacgatataaacattacattccattatgatacgctcccttttaatatgttcaaaataaaatgctttaaaattttgctgcatctatttttttatatttttaaataaaaataactattcccacatcatcgcaaataatgcgaagacttagaaatagttataatcaatgctatgtttaaacgtcatgtaattatttagcagtacgttgatctgttaaatcgacatatgattgcgcccatgcttcaattggatgtaaagcctctgctaacgctttacctttttcagttagcacataaataatttgtactggactcgtagaaatgatttgcttctcaactaactcccattgtgcaagctctgacaacttaagacttaaagcacgtggtgttattgttttcaaatctcttttcatatcggaaaagtgtgctgaacagtcattacatcttgagagataattaatgattaatccattccaacttctaccaagtattttaaaagtttcttcgagatacggacatacttccatcatcttcacctctcatcaataaatttagaatgtaaacgaacaccattttttaatcagtataattattataccacaaaacaagataaatctatacagtttccgtccaaatatctgcacctaaagcttttaagtgttctacaatatctgtataacctctataaatatgtttaacattgtaaattgtagttacaccctcagcaattaaaccagcaataattaaacaagctcctgctcttaaatcgctagcataaacttcagcaccatgtaatgttgatggttttatcgttgctgtgccttcgtcaacttcaatatttgcacccatgcgctttaattcttcaacatgtttaaaacgctccggataaatcgtatcagttacaaatgaaggaccatttgccataaataataatggtgtaataggctgttgcaaatcagtagcaaaacctggatatactagtgttttaatatcaacaaattgatatggcgcattattattgatgcgaattctttcgtctcttacatcaacattcacacctaattcactaaatttagcagttaatgtttctacatgtttcggaacaatattatttaatataacattttctccacatgctgcagcgatacacatatatgtgcctgcttcaattctatcaggtataacttgatactcagaaccatgtaattctttgacgccattgattttaattgttgatgtacccgctcccttaatattagctcccatacttgttaagaagttagcaacatcaactacttccggttctttagcagcattttcaattacagtttgtcctgttgcataaactgcagctagcataatgttaattgttgcacctacgctaaccatatctagaaaaatatgtgcaccttttaactctttagcttcgattttcattgatgtcgtacttgattcatcaatttcagcacctaaagctttaaatcctttaatatgttgatcaattggacgtggcccaagtggacatcctcccggtaaaccaatcacacattttttaaatctacctaacatggcacccatcatatagtatgaagcacgtaatgattcaactttattatttggtaatgcagcattttgtatttcagttgtatcaacttctaattccgtaccatttagtgatgccttaatatttaaatcttctaataaactcactaaagttttaacatcagagatttgcggtaacccttctaatttcacatgtccttgagctaataatgttgcaggaatgatagctacagcactgtttttcgcgccactgatattaacttccccatttagtgtgcgtccacctcttatttttattacctcttgagccatatcatttatctcctttgtccattactttttaattttttgcattattagcattataaattaattttactttatttgtaaaatagtttattttaatcgttaaaatcttgtctttctattttcgattgattaataacaaatcattcacctttactaatatatgctgttcttccccacttgaccatggtctaaagtctgattattcaactaaatattgacgttgttttgacaattatttagttttaattctacggttttcacgtaaacttttttcataaattgctcattttccttataattatatcacaatcaattttgatatattttaccatttttacgctttcattttaaaatcaaactgttttatttattacttatacgacataaaaaagaagcaaacaccattttgtctgcttcttttaaaattaatatccctacgttattaataacttaaagactaaatattaattatttagcgcggttagaagtaccgaactctttaattttacctttaactgtttctttgatggcttcacgtgcaggtcctaagtatttacgaggatcgtaaacttctttgtcgttatttaaaacgtcacgaactgcttttgctgaagcgatttggttttcagtgtttacgttaattttagctgtaccaaatggaattgctttttggatatctttagtcgggataccagtaccaccgtgtaatactaatggtaaacctgtagataaaccgatttcttccatttctttaaatcctaattttggttcacctttgtatggaccatgaactgaacctaatgctggcgctaatgcatcaataccagttttttcaactagttcttgacattctttaggatcagcataaatgatgccgtctgctacaacatcatcttcttgtccaccaacagtacctaattcagcttctacagaaacacctttttcatgagcgtattcaacaacttttttagttgttgctacgttttcttcgaatgggctgtgtgaagcatcgatcattactgatgtgaaaccagcatcgatagcttctttacatttttcaaagcttgaaccatggtctaaatggattgctacaggaatagtgatgtttaagtcatgcattaacccttcaaccattttaacaattgtgtagaaaccgctcatgtaacgagcagcaccttcagaaacacctaaaattacaggtgcattttcttcttgtgacgcttctaaaattgcttgagtgaattctaggttattaatattgtattgacctaccgcataaccattttcttttgcatcaattaacatttctttcattgaaactaaaggcatgaaagttcctccttgagtgcttacgcacgtatttttcaaagtaattatatcaaaaaaatagcgtcaatgcattgaaatactgcagattaaatgtgtattttttgaaaaatgcgatagttatactaaatgcaaacgtatacatttttatacaatttaagccgttgcataatatgtagtcattaattacaatattttataagtagattggaggataaagatgtcaaaaatcttaaacacacaactaataggtatctttaataggctagaaaaacaatctttagaaattcaaatggccgcccaatgtttaattcaagcaattggtggcgaaggttatgtttatgtaaaaggttatgatgatttacagtttttcgaaagtttcattctacatagtgatgagcgtttaaaatctagccgaaaacttgacgctattaaagactttaaagaaattgactcaactgatcgtgtattattattcgcaccattttataatgatcaagttgcattagatattcaaaaacttatcgacttagatatcgatgtggtcttaataagcaacaaacctaaaacagatgatttccctgatcatctcgtacattttatcgatttatctacaccaagacctatagtctacactgaagattacgataagattgtccaaccacatgcgatggcattgaattatgtatactatgacatttatacacaaatgattgaaatgacaagagacttagaattataaaagtcactattgttatttcataccttgtcactaacataatattaaaattatacgaaaaaccggtactttcaatgtttaacaatgaaagtaccggttttattagcaaatttatttattttgttgatattttaatgaagcttcaataaatgatttaaaaatcgggtgcggacgatttggtctagataagaattctgggtggaattgacaagcaataaagaaatcatttgtcggaatctctaccatttctactaaacgtccatctggacttgtaccagaaatcaccataccatttgcttctaattgttctctatagtcattattaaattcataacgatgacgatgtctttcttcaatttccgctttaccataaacatcttgtgccaatgtgccttctttaattgaacatggatataagcctaagcgtaatgtaccacctaaatcttcgatatctttttgttctggtaataaatctataattgggtatggtgttgctgggtctaattcagctgaatgtgcgccttcaaggcctaatacgtttcttgaaaattcaactgttgcaagttgcattcctaaacaaataccaaagaatggtacattgttttctctagcatacttaattgcactaattttaccttcacttgcacggaaaccaaatccacctggtactaaaataccgtcgacatctgcaaggtattcggctgcattttcatctgttacttcacttgaatcaatccatctaatgtcaatatctttggcaaaaggatatccagcatgtttcaatgattcaacaactgataaatatgcatcttgtaagctaacatatttacctactaaaccaattgtaattttaccatctaaattattaacgatatctaacaactgtttccattcatcaagctgtgtttcatatttcgcgtttaattgtaaacgtttaataacgatatcatccatattttgttggcttaattgtaatggaatttcgtataaagagtctgcatcacgacattcaataacactttctttattaatgtcacagaataatgcaattttatcttttaaatcttgtgtcatttcatattcagttcttacaacgattaagtctggttgaatacctaagcctcgtaattctttaacactatgttgtgttggcttcgttttcatttctccagcagctttaatataaggcagtaatgtacagtgaacatacataacattttctctacctaaatcgctacgaatttgacgaatcgcttcaataaacggtaatgactcaatatcacctgttgtaccgccaatttcagtgataacaacgtctgcattcgtactttcccctgcaagtaataaacgttctttaatttcatttgtaatatgcggaataacttgaactgttccgcctaagtaatcaccacgacgttcttttttcaatacgtgtgaatacactttaccggctgtcacatttgaaaacttgtttaaattaatatcaataaatctttcgtaatgtcctaagtctaggtcagtttctgcaccatcatccgttacgaatacttcaccatgttgataaggactcattgtacctgggtcaacatttaagtatggatcgaatttttgaattgttacatttagacctctatcttttaataatctacctagagaagatgctgtaatacccttccctaatgatgaaactacgccacctgttacaaaaataaattttgtcatgtcttgacctcctaattattaaagggaatgcttcctcatcaattgtaaaaattacgtaaaacataacattaaagcaagctcattcaagttgtttatttgtcgaattcgacaaaattaaattctgtttacttaccgtttccatactgctatgtcactatgtatatcatttacaactttgatttttgcgttatcatttcttgatttactcaattaaataaaaaaacgctccctctcacaaattctgtaaggggagcgtataaattttatacacgtgtcctatttaaaggagcccgaataaaattttatcatctttcaactaaaagtcaaacaaaaaattaatcgttgaagtcttcttcgtcttcaaacacttcttcgtcttcgtctagttcatcttcatcttcttcaatgactatatccgaatgattgatttcttcttcaacctgctcatcttctggatcatttagttcttcttgatcatctgtttgagctggaatatcatcgtcgtcatccatttcatcttcgcccaataattttaagttttgatcttcttcatcatctgcatccagaatatcgaatttttgaatagttggtgcgattttctcttcaatatcatctaccgaataccaatcacgtaatccccataaattttctccaacatttaaaaaacgaccatctgtgtttaaatccgtgtaaaattgtacaacacgattttcaatttcttcgtactcataatcacctaacgctctaaattcatcgatgatatcatataagttcattgtttcgcctttatcattcaataatgtataagccatatcaataaatgatttttcatcaaccatttgttttgtataatcttgaattttcattgcccaatacttcctttcgaaggatataatctaaatttatacgtctgaattcatttatatatagtaacaaaactaaattataaatgacaatatcatatttcgcaatcactgttagtaatttaaatatttttcgaaaacgacataatcatcagtttgttcgatttcaacgaaattactatttaaacataatggtttaaaatcattattctctccaaacagaatcatcgtaatcacattaaggttgtcatagttttttcttaagtaagttggcaattgtcgcagagcacttgaaccaataccattaaagcgatatgatttatccacttcaatagcagcaatgttcatgcgttcaccaatctgctccaatgcgataaagccaaccttttggccatcaatcattaaattaatgatatgtacattggtcacttctgaacgactttcttcttcaagctttaatgatgaaacatgttttgaatctaagtccaagtaatatagtcgttctttgccaattggtccttcttctttagtcgctgtatgcatgaatccagcacgttcgtataggttccaagcattgtcattttccgcatctactactagatatagatgattaaaatcaggaaatacaccttgaacatattgcggcaatgacatcattattttcgtgccatatccaaaaccttgatatttttcattaatcgataatgaacgaatataaacgacattttcaggtatatcataaccttcatgctgatagtaacgatgtaatacaaaaaagcccaccacttcatttttatcgtttattgctacgttagcaatcctatcagcatcattaattgcatcatcaataacttctttaggtaaagatgaatatatttgttgtctttcattcaagtcaaaatcattaattgctgaacgatattgttcatcaaatgcttttaaagtgataccttcaaaacaaagttctttagccatatatttaacccctatctttttatatatgaagcatgaatccccatattattttacctattatttcactacgataccattatttgctctaagttaaataaattacttatttatattttttaaatttcaaaattaatgtactattcctcattacttatcattttaatcagagacttacaaatacactgcgtacgaactacttttaatattgcgtcactaactaacaatcctatacaacttcaaaattcctagaaaataatatatataacttaacgtccacgtttgtaaaacattaattgcgatacgcttacaatgttgaaatgcaatggcatcaaatttgttaataattactattattacttgttttttagtcattttactatactattatttaaggatagacattaataatgaggtgggaatcttatgaaagttggcattgacgctggcggtacactaattaaaatcgttcaagagcaagataaccaacgtacttttaaaactgaattaactaaaaatattgatcaagttgtggaatggttaaaccaacagcaaattgaaaaattatgcttaactggaggtaatgcaggtgtcattgctgaaaacatcaacattcctgcacaaatttttgtagagtttgatgctgcatctcaaggactaggtattttgttaaaagagcaaggccatgacttagcagattatatttttgcaaatgttggtaccggtacgtcactacattatttcgacggccaatcacaacgtcgtgtaggcggtatcggtacaggtggaggcatgattcaaggactcggttatttactaagtcaaatcactgattataaacagttaactgacatggcacaacacggtgatcgtaacactatcgatttaaaggttagacatatttataaagataccgaaccacccattcccggtgatttaacagcagctaattttggtcatgtactacatcatttagatgctgattttacacctagcaataaattagcagccgttattggtgtcgttggcgaagttgttacgacaatggccattactgttgcacgtgaatttaaaactgaaaatatcgtttatatcggttcttcatttcataataacgctttattacgcaaagttgtggaagattatactgtgttacgcggttgcaaaccgtactatgttgaaaacggcgcattttcaggtgctattggtgcattatatttagaaaaatagaaaaagaccatttatatgcgcgttgttttaaataaacgctatataaatggccttttattttatggtctaagtgttttgaatacgtattgttccatttattatcacttaattacttacaactcaattcaattaaaatgtaagttcattagacaatttttgcgctgaaacaattgtaccaaccacgccagtttttaaatctatcgcaacggctttatgatcatctctaagttcatctagccattctccgaaaacagaaccttcaatcgtaattaaatcacactcttcaaaatcttcatctcgaacttttaacgctctgtttttaatactccatacaggcataatatgcggctttttttcgtcgctatcattttcactaatgagaataaactgcttactaccttttttagttaagccgtatacttcatcatatttcgctacatcttggacaaattctttgattctaattttatctaattccgtcatcacttcttgtgtaacagctacaacgtttagtagatgcccttcttcttccattgtttgattcataataatatggtcttgttcatcaaacaattcatctaattcataagtagcaaaacgatcaacgtccatttttacaactttatcaaatggaatatcacgacttgttaaaaatgatacggccacactttcttctgtccaaacgcctacatacgcttcacttttataatttaggcgtactagttttttatttttagaggcgaaataaatacattcatttattaatatatctctaaagaatggatatgctttataagacatgcttgaccctcactttttaaaatatgtcatacataaaatagtaaatgactccaacaagttagtcaattagacatattatgaattcaatttaatgtcatgtttttcattttaaaaattcaatagcattaaattttacgtatacacaaattcggtctataacacgaaacatatctagttactaaaaatttcaaaacgataacctttagtatacctttatcaacaaaatggcaactcttataacatagtgaaataaaagtcgccatttaatattagtattacaaagtattgccatatcataaatttaattactgttgactagaatcgaaaaaagcttgttacaaacgcatattcagtcaactactggcaacacaacattgtagcgccttatgttccgaactctaatagtgttcaagttcagctaaaaatgcgcgttcattctccagtactgtttcttttgaatcaccatgccaaatacagccaaaccttgatttaactttatcttcaccgtaccaatcaccatcataataagataacgggtataaactaccttctttgacatatttcaaaatcgtattgaagaaatgtgtgttatcaccttttgaatgataactataaaacttttgatatcctgaattcaactcgttagcaagtaataacatgctcgttgaaccattttgtctaaagtttaaatcaatcgcataaacgttatcatcctcatcgacgagtaggtcaaaaccagctacaccaaagaatccttgattcacaccgttttccataatttgtctacctgcttctataacgtgctctggtacattagtagtattttcatttccgttataaaatccgtacttatccgttaattgcgttgccgcaccaagatattgaatgcctagcgattccgagtatgcaaactgaacgcaataattcgctttttcttcaatcttctgttcgataataagcgaattcgtttcagcagttgcctctttaatacgcgttatcgctttttgtaaatctgcatcatgataacaaatcataacgccatagccacctgctgtcggaagatcatctcccggcttaattactaacgggaattcccaattcttaatctcgttttcgaattgctcaatttttacaacttttctttttggtaaaaacttcccatttgtccattcaggtattcttgctttattatttaaagcaacaaataacgttttatctaatgcataatattgctgattcaagattgtttcatcatgaatatattgaaaataaatctttttattttccttatgtgccaattgtttgatcaagttttcgtaagattgctgattgttaaatgtataaattgagttcggtacttccttaccaataacttgaaatagctgatgcaatttgtctgtcgcactagcttcgtgaacaataacaggtaattgatttgctattaataactccctaccagttaaaaaattagattgatgttcgtccggtttcaaccatggattcgatatatacgaaggtcttgacgtatagacaacatctttgtcatataaatcacttaacgttaagttcggctcattaccattatttgtcattacttcccattccctttcaaatgcgcatgctcttcaataatgtcttgataaacgtcttgatttgtaattaactctaaccccatcaacgccattattttagcgcctttaattaatgcttcatcaccatgtacactcgcagccgcttctctaaatctatgcgtatgtcctactaaattacgtgatcctattttaatatgaggatgtattgttggcacaacatgacttacgttccctgtatccgtagagccataaccaaaatcatcatcaataactgcttcaccaacttcttcagcatatttagcaaataaatcatctaatttcggcgttttaatgaattcattcacaccgttttgaattcgaccaaattcataatcacaaccagtctgtatcgcagctccacgtgcgatttgatttactttttctgttaatatatccaattctttacgcgtcattgctctagtataaaaacgagcatgtgtatagtctggaataatattagctgctttcccgccatctaaaatcacaccatgcacacgttgatcttttttaatatgttgtcgtagttgtgctacaccattaaaataactaatcatagcgtctaatgcatttaacgcttcatctgcattttcagaggcatgagcactttttccgtaaaatttaacatctaaaacatccactgccaaagtatcaatcgttttataagtttcatttcccggatgaatcattaaggcaatgtctatttgatcaatcacaccagccttgacataagaagctttagcgctaccattttccccaccttcttcagctggacatccaagaacgactactttaccaccaatttggtcaatcacttgcttcaaaccaattgcaccaagaacacttgcagttccaatgatattatgaccacaagcatgacccaatcctggcaaagcatcgtattctgctaaaaaacctatagctggcccgtcaagtcctgaatcatatgtcgctataaacccagttgcatgcccagcaatctcggtttcaatttcaaaatcatgctctttcaaacgatctattaaagttcgagacgcaaatatttcttcattaccaagttcaggacgttcatgaattctatgactgatttcgatataactatatttatttgtttctatataatcgagaatttgttgtttttcactcattttttactatctcccttttaccctacactcattttaatcatccacaatattttgttctttcaaaatgaattattacttattctatcggttttatctcatgatgtcatctagtttttctttatttacaaaattttctaataactaaaagcctttcataaatttataaaacagtttcaaattgtaaaacataagccctattgttacaatttaagtattgttagaaacacaacttacaacaaacttaagttttataatgcaacaaatcataagcgttttatagttttgagtagttaataggaggaaattcaaaatgacaaaaatgaatgttgaaagtttcaatttagatcatactaaggtggttgccccatttattagattagcgggaacgatggaaggattaaacggagatgtcattcacaaatacgacattcgtttcaaacaaccaaacaaagaacatatggatatgcccggactacattcattagaacatttaatggctgaaaatattagaaatcatagtgacaaagttgttgatttaagtcctatgggttgccaaactggtttctatgtatcatttattaatcatgataattatgatgatgtattaaatattgttgaagcaactttaaatgatgtgctaaatgctactgaagtgcctgcttgtaatgaagtacaatgtggctgggcagcaagtcattcattagaaggtgctaaaactatcgctcaagcatttctagacaaacgaaacgaatggcatgatgttttcggtacaggaaaataaatcttagtcaatcaagttaatcagaaaagcagtcgaacaatgattttacaatcgccattgtccaactgctttttattatgcttcaaagtcaaaaaatcgaacaaatgaaaaagtaaaatctttaacatttgtccgatttatttgagaaccactataatttcttaattagtcccattaacacgaactgcataggtaaccttaaatatagttgccatgttggcaattgtttatctcctaaaggtaactttttaactgccatatagatattagctgggaatacagctagcaagaatagattgattgtatttttcaagcattgagatggtcttttaattaaaagtgcaagtccaaataatatctcaaagattcctgtaacaagaaccgctgtttttcgaagtggcaaacatttcggtatgatatttctaaattgtcgttctcgtgtaaaatgcaatacacctattacactaaaacctattcctaataaatatcttagtatgttcaatcagcttcaactcctattctgtaatgattttatgaattaatgtaggcgatacaacatgatcagcaattgttatgcttgaatctaattttttaacaacatcgtctacatcttggcgattactgtgaatcgttaataatgattctccttcttctactttatcaccaatttttttatttaaaacaataccaaccgctaaatcaatatcatcctcttttgttaaacgtcccgctcctaacatcatcgaagcgacacctatatcgttagagactaattcagtcacataacctgattttttagctttatattcaatttgatattgagcttgtggcaaacgctctggatggtcaataacagtttcgtcgccaccttggtttttaataaatgttttgaatttttctaatgctgcacctgaattaattgcctcaattagcaacgctctcgcttcttcaagcgtttcagctttgtttgcaagtacaaccatttgagaacctaatgttaatacaagttctgttaaatctttcggaccttgtcctttcaacgtatcaattgcttcttgtaactcaagcgcattgccaatcgcacgtccaagtggctgattcatatcagaaataatcgccatcgtattacgtcccacattattaccaatacgtaccattgcgtgcgctaatgcttcagcatcttctaatgttttcataaatgcaccgctaccagtttttacatctaatacaattgcatctgcaccagcagcaatctttttactcataattgaagaggcaattaatggtattgaattgacagtaccagtaacatcccttaaggcatataattttttgtctgcaggagttaaatttcctgattgtcctacaactgccactttattttcattaaccaatttcacaaatgttgcttcatctatttcaacatgaaaaccatcaattgcttctaatttatcaatcgtaccacctgtatgacctaatccacgcccactcatttttgcaacaggaacatctacagctgctactaatggtgctaaaaccaatgtagttgtatctcctacaccacctgttgagtgcttatctactttgacacctttaatatcactcaaatctatcatatcaccagaattaaccatagccatcgttaatgctgcacgctcatcatcattcatatcttggaaataaatcgccattgctaaacttgatgcttggtaatcaggaatatcccctttaacatagccgccaataaagaaattaatttcttccgttgttagtgtatgaccgtcacgctttttctcaataatgtctatcattctcatttttatcatccttttcttaaaaagcttaggacaaagcatctgcgctttctctagtccatttttaaaagcacaagcgaaaattattatagcaagctatcgatttcatttttaatatcacaatttcaatgcgatgttattattcttaaatagattggttataacgttaaagtccctattaaattatcttagaatcatcatggcatttatgatgtcttaaagctgatatcgacatacttatatatggttacgatgtcccatgcttacatatttttataaaattagtaatctgaatctgcttctaaaccttgcataatttgaacgcctgcgctcgcaccaatacgtgtcgcacctgcttcaaccattttattgaaatcttctaaattacgtacgccacctgatgcttttacttctacatcagcacctactgtatctttcattaatttaacgtcttctgcagtcgcaccgccacctgcaaaacctgttgaagttttaacgaagtccgcaccagccgtttttgttaattcactcgcttttacaatttcgtcatggtccaacaataccgtctcaataatcacttttactgtgtgacctttcgcagctttcaccactgcttcaatgtcttgttgtacatcatcaaaacgtccatcttttaatgcgccgatgttgatgaccatgtcaatttcatctgcaccattttgaatcgcatcttctgtttcaaatgctttcgtcgcagttgtcgatgcacctaatgggaatcctattaccgtacaaactaacacctctgaatcagctagtcgctctgctgcatatttaacatgcgttggattcacacatacagatttaaaatggtatgctttcgcttcatcgatgatttgatcgatttgcgtacgtgttgactcaggcttcaataaagtgtgatcaatcaattttgcactattcattttctatctcctcctttatggttgattataaaaatacggttgtaaattagttgattgagcgtcaggttcatttaaatatcaggttagatgttcgctttttatgtaaccgcatacatatactattacattaattcatttcccataaacaaacaatacaattgaacgtgatatcttcattatgaacgatgacttgacaacaagctaatcaggattatatttttataattctttaattctatagtacaaaaattcgcaaaaaagggaaacaaatgttatcttaaaattattaatgaatattaaggagaagataacaaatgacaaaaggtacaccacatattcaaccaaatggagtaaaaattgctaaaacagtattaatgcctggcgatccgctacgtgcaaaatatattgctgataattttttagaaaatgttgaacaatttaacgatgtacgtaacatgtttggttacactggtacatataaaggtaaagaagtttctgtaatgggttctggtatgggtattccaagtattggtatttactcatatgagttatacaacttctttgatgtagatacaatcattcgtatcggttcttgtggcgcattacaagaaaatgttaacttatacgatgttattattgcacaagctgcatcaactaattcaaattatgtagatcaatacaatattccaggtcatttcgcgcctatcgctgacttcgagttagtaactaaagctaaaaatgtcgctgaccaaatcggtgctactacacacgtaggtaacgtattatcttctgatacattttacaatgccgatccaacattcaatgatgcttggaaaaaaatgggtattttaggtatcgaaatggaatcagctggtttatatttaaatgcgattcatgctggtaaaaaagcacttggtattttcacagtaagtgatcatattttacgtgacgaagctactacacctgaagaacgtcaaaattcatttacacaaatgatggaaatcgctttagaaatcgcagagtaacttatttaaattgactttaattgctctttaacaatgcgattaaactcaaaaagccaacacattctgggcgtatccccatttatgtgttggcttttatttatattattacttatctgtagattagcttaagtaagatttaaacatccaattatgtttatctactgatgtttgcatacctataaacatatcttctgatacatcatcgccagcattaccagcaatttcgattgcgttttctaattgttttgagatatttgtgaagtcttgtgataattcttcaaccatttgttctgcagagtaacctttcgcagcttctttaacaattgattgctctaagcattcagttaatgtacctacagggtttcctcctaccgctaaaattctttcagctaattcgtctacatattggcttgcttcattatataattcttcaaatttaacgtgtaatgagaagaagttaggccctttcacataccagtggaaattgtgtagctttgtgtaagctactgtccagtttgctacttgttgattcaattcttttacaacatcttgttgattactcatatttaatacactccttaaaattgtctacgtcttgcttgtttatattaattattatattataataattttaatctgtaaagtgtttttgctctcttttttataattattctaatctaaccgtaaagtgttccgctatttaaatgcctaaattttaattcatcatctaatatatccattatcaattagcaagtatgttttatcaatcagtaagttttactttcgcattatcatctaaaaagaacgatttttcataatcatttggttggtgccatgttgttttccacattctatttctattattagcaaacattcgataaccgaaattacggactggtttaggtacaagccataaacctacgcccaataatttagttcgattaggtagtgctgtgattagtttaataatcgcctgcgattcaaaatatatacgatcacctttctgtaaaatcacactatttttatttgccgcttctggatgttgtttaaaaaattgttggccaacttcaccttttaacgtggcaaattgataatttcttggtaggtcatgttgaattaaccaaatgacatagttataacaatatatacagtttccatcataatatacgattggcataatttattcgctcctttaatagtacttatagtcatttttcctaatttaaaaacatttaaacaaggttgtcacttgataagtcctcgcgacacgaaattgccataaaatttatttttcagttttatatttattgtataatgtattttttatttactttaaatttctcaatctacagtgtaatcttatttcttattattaacttagcgtttggtcattcgtcttattcaacataccactggaaaactcatataaagttttaattctgtaacataaattcttttatattcatatactgtctttattatttattaaaataaaaacgagtaatctatcataagctcttaattagctcttatggttgattacccgtcattttttctttatgcggttattcaaatatgcaattatgcaatttttaatcctatccttacttcttttcaaaaactaccatatatcattagtcatgtttgactttgactatacgtgtgtattttaaaaactgctctgaatatttctccttaatttcctctaaactgtcatatgtaatacctacaatatgccaattaggattgaaataatagaaagaatctttttgtcgtgaccatttaatcatattaccgtctttattataacgtggtaatgttacttcatagccttctaacacattaatatacgtttggaaaatgtctgtatctatacgattaaaattatcaataactaaataacttttatcctttttaggcattaattgagtaataaacccttcacgatagtataatgcccctgtttcatttggtaaatacttgccataaagcatatcttctgaaaaatcaggatgacctgttgttataacaggatttgcattcgctttttgcaataagtcattagccgcttttaagccttcttcttttcgatctacaacaagtaaaataaatggctttaacgcttcttctttttcactttcaagcatatctggtttttgaaccatttcaaatggagatttcaatccattattatcgctcatttcaataattgcatcatactgtgcttgtgacatacttgcaatagcctgttttgcattttcttgaaggaaatataagtttttcaatttaggatgcttatttaatgtacttaatgtaatcggtgtaatgtctttctcataagacacttcaatcactgtactatttgttctaccaggaattggtggtttttcatgaatatgctttgatacttctccaattccaacgacagattgatttttcgttcgattataaaaaataatattgtcgccttcttctaactgagtataaaaatgataaccattacgtttaataccgttgtacgtgtgcgtataaatcgtatattggtttccaggttcaaattcttcagtttcagctaaaaagaaataacgcggtatcttaatttcgcctttaccaagaccacttattaaatcaaactcttctgcagtgatttgattgaacaatgtctctttcatattacttatacgaaattccaaagcttcactacgctttaaataatctgctgttaatggtttcaattgttcattaaaacgaaactgtacacgtattttattttgtgcacctgtttcaacactaataatttcaccacatccaagtagtccagtatccgtctgaacttgataaaagatgacttgatctcctactttagcctttttaaacgctctaaatccttgagatgggttaaaatgtgcgcctgattcaaataaagctgtttgtcctactaacggttcattatgattccaacggttatatccacaattcaaccaaaaataattcgtttctgctgtcatcttaatactccttaacctgaataaattttagaaacactatgaattacattcttttagtgtttcttatgcagttggacgcgtatgcgaacaactgtataccctttgttcactgcgattttaatcgcatttcctataacattgtagcgcccaggacattaatttacgtcccagacccttatcgttttcacttctaagtaagtcgaactattttgctttacaacaagtgcgactctaaatacagttggacacacatacgagcaactgtataccttttaatcagttttctatattttatttattatatctgtcttaatgataaaaattgttacaaacagtttaacatatttagctacctattttgcatataaaaaacatgcttgcatacactatgcaataaaaattacaaatttatatatgataccactatgcttgcttatctctatagcgccattgatacacatttttaaatatctatactgccgttagaattttatcatgtcttaattttcattaaatattaattacttcattttatataaaccaacaaaaaccccctcactactatgcaagtgagaggttatgttgatgtgctttattttcatcaatgtcattaacacaatcatatttcttctgttaatgcactgtattatattcaaacgcgctatcgacaattaatttgaagctacaaaggtaccgcataatggcagcacattaattaacaatgcgctaaactttaatgaggcgctgatttgcttgtctttaaaagtcaacatagcactgataattcctaaaatagctactatacgtggaattgtcatgctcggatactgcggtatatgtaagaaagcaccaagacctgctatcacaccacatactaacgcaatatatagaaattgcttcaaatcattcactcctaaattgttattacactattacacatagctaatcatcaatgtgaaatcaccttcaaagacactatccaaatcttcagaagtcaaaataaagtttgtaccagtagtcagtttgaaaatttcaccatcgacaatcatttgcccttcgccttccaacactgtaactaaacagaactctctaggcttcatataatttaacgtgccagaaatttcccatttaaccaatgtaaagaaatcattcgatacaatgtgtgtacacttatggttttcaataatttcgctttcaggcaaaatattaggtaatggtgcattgtactgaataacgtctaaagctttttcaatatttaacggtctatcattatattgattatcttgacgattgaaatcataaagtctatatgtaatgtctgacgattgcatcgtttcgtatgctaatattcctgaagaaatagtatgtactgttcctgctggaataaaatagaattctccaggttttactttaatatatctaagtatcgactctatcgttccgtgttgaacatgattcgcaacttcttctctagactctgctaatgtccctataactatttctgcatcttcttctgcatctataatataccaacattcagatttgccatattgcccgttttcatgctcataagcataagaattatcagggtgcacatgaatagaaagtgattctcttgcatccactattttagttagaagcggaaaatctttgcttgggaaatcaccaaacaattcacgatgttctgaccaaatacggtctaatgtttgaccttgatatggtccattaataatctcgctcgtaccatttggatgtgctgacacacaccaacattccccagttgtatcattgtctaattgatatccaaactcacttagacgttgaccgccccataattttgtttttaaaattggttgtaaaaataatggcattgttgcacctccattgtgattaagtaagcaatagaactctgatgttgttgttccattatattttgattttgttctcatttacatcgtattattaacttccacatttcaaattaactattagtgattgtaccatatttactaacattgcagtactgccaattaaagcgcttcacttaaatttacagtactttaacattttcaaaaatttatagcatagagattatatctctcttacatttgtacatatttccctttaaatttactcgcccattataccaattaataaacaactttaatagttgtgccatacattgttcaaattctttgtaaaacgcatagacaatacgtacttattcatacttataattcatcattttcaaaaaataacgagttacgaaaaagtaacccgcttcaaatcatatttactatccttattaatccgtttcattttcaaattgagttaaagcatctttaatgtcctgatcaccactaataatttgaaactcttggtgattaaaatgattggatgtgacaatttcttttaatactgtcgcaacatcttctctaggaatttcacctttaccatcaaaatattgtgcagcttctatctttccagatcctgctgcatttgtaagtgcccctggatgtaaaattgtataattcaaacctgaacgtcttaaatagtcatcagcgtaatgtttagctattgtatatggctttaaatcaccgctatcatcaaaagcctgacgtctcgaatcatatgttgaaaccatgacatagtgtttaatattggcctctttactcgcaatcattgatttaacagcaccatctaaatcgacaataattgttttatctgcacccgtgttccctccagaacctactgaaaagataactttatcgaatggtttaaacgtctcagttaaagtctctattgaatcattttcaacatcaacaagaattgctttcataccttgtgattttaacgcattaagttgatctgattgcctaacaccagcagtaaatggtacattttcttttgctaattgttgcactagtaacgaacctacaccgccattagcacctataaccaaaatattcatttacaacactctcctatttattattctctatgccataccactttatgagatatgtaaaacttgttacaactataaaaatcaattgacatactactgggaacgtattaaattaatatatgaacaaatattcacatgaaaggattgtcatataatgtcagaacaatattcagaaataaatacagatacattagaacgcgtaactgaaattttcaaggcattaggcgattacaatcgaatacgtatcatggaattgttatcagtcagcgaagcaagtgttggtcacatttcacatcaattgaatttatctcaatcaaatgtctcgcaccaattaaaattacttaaaagtgtgcatcttgtgaaagcaaaacgacaaggccaatcaatgatttattcattagatgacatccacgtagcaactatgttaaagcaagccatacatcacgcgaatcatcctaaagaaagtgggttataatatgtctcattcacatcatcatcatgaccatatgcatagtcatgtaactacaaataataagaaagtattgtttatatcgtttttaataatcggtctatatatgtttatcgaaatcatcggcggtctccttgctaacagcttggcattactatctgacggtatccatatgtttagcgacacattctcattaggtgttgcacttgtcgcatttatttatgctgaaaagaatgccacaactacaaaaacatttggttataaacgtttcgaagtactcgcagcgttatttaacggtgtaacgctttttgtaataagtattttgattgtttttgaagcgattaaacgtttctttgttccttctgaagttcaatcaaaagaaatgttaatcattagtattatcggtttaattgtcaatatcgttgttgcattctttatgtttaaaggcggcgacacttcacacaatttaaatatgcgtggtgcttttctacatgttatcggagacttattaggttcagttggcgccattactgcagctattttaatttgggcatttggatggacaatcgccgatcctatcgcaagtattttagtttccgttattattttaaaaagtgcttggggtatcacaaaatcttcaattaacattttaatggaaggcacaccaagtgatgttgatatagatgaagttataactactattaaaaaggattcacgaatacaaagtgtgcatgattgccatgtttggacaatttcaaatgatatgaatgcattgagttgtcatgttgttgtagaccatacattgacaatgaaagaatgtgaattattattagaaaacattgagcatgatttattacatttaaatattcaccatatgactattcaattagaaacgcctaatcacaaacatgatgaatcgattatatgttcaggaacacatagtcattcacataaccatcatgctcatcatcacgcgcatgtacattaataattttaacctactgccattgcatcgattaaacttttcaatggcagtaggttttttatgtctttatggcgacttgtttggtctttgatgatgcaatgtttattaacaaattttcaactattatttcttacattagtcatatttttgacaatttactattataattctctaactttagtcactttaattaatttttattagatattaatatgaaaataacgtgttttttgttattgtatttatatgaagaaaaggaggcaccactttgtttacttactttaaatcagcatttaaaaatgctaaaccacaattattaataacattgatatatgcacttatagcatttgctgtaattgcagttgtatatttacttgctaatttccagcttgctaagtatgcacaaactattgcaatttattcacaatttgggcaaaaaccaccagtagatgcatatttaaaagttatcgctgtattacttatagcagctgtagtttcactgtttgttttagttcaaatttttatcggaattacaaatgttatgaaacgagcaatgagtcatgaaaaagtaaaatttaccgatttatttattgcatttaaaaaaggtaattatttaaagagcgttctgatcggtcttgtatctatagcaatgattatcgttctttcacttctgacatcattactatacaaattattttctccagtatcagaaatgattatgaattcagtacaatcatcatatgcagatagtacacacctgattggtattgctattacaactcaaagcatcataatcattgttgttttattgattaaagcaattattacttggttattgttaatacctattttcaactttatgactagtttcgttgaatcaactaacgataaagtaaaaacacacttagctaatggatttaaagcaatgaaaaatggtcaaaaaacatttttcaaatttttcattggaatactattattaaacttaattattattttatttaaaacacctgttggttacttgatttcatttaatacgcaatcactctctcaaagtgttgcagaaaatatcataagagtttatacagtaatgacaattattttattcgttgttattcatgcaatcattttaatgggtatcgttcaatattacttaaaacgtggtcaaaaaattactaaagataaagtaaaaacagctgacaagaataaaaaagttgtcactgaaccaaaaaatacaaaagtagaaaatgataaagtgacaacatctgttgaaacaaaaacagaaaaagcacaagattcattaaatgataatacaacaaaaacaatgacttcagataaaccagaagacaatcaaccaaaataaattttagagccccttacaactttagttgttaggggctcttatgcatgcgcttagcgcaggcgctcctacttttaaactttagttgttaggggctcttatgcagttgatgcgtagcatccaactgtgttcctctatttttcaactttagttgttaggggcttctttctaaaataactaagtgaattatctatatatgaagaggtctccaatactttttatataattcgtgattacattctatacttttaattgtattttctgctgtatggaaagttggttttattaattctgattatgttcagaactacaattcataagaaaaatgtgttaaaatatatttgtagtaagtagaagcaaaagatgaaaatcattaactcttgaaacacaaaaagggcaacactcggaaacatgttaccctaatgagcccgttaaaaagacggtgaccttatattttatttaaaaatagccttcaaaaatgccggtcaaagcgaatagaaggttattttttatggtcttgagtactaatcaatactaaaccaatgattgttaatacaaccataagcatttcaaaatcagacatgctagtcctttctaggagtaacaactataaccataggcatcacccctttattaagagattagccaccatctatccaacttgctcaataaatattataacatgcacacttttaaacagtaattcatagtataagttttttcatttcttaatcaactcgataaacagttgagtgacatacccttgtctaactagctatttcttcccctgttatcgtttgttcatcatataaaaatttaatttctcattttttattctctggtaaagaggggcgcccgctttttcggcctctcgctcttgttgctgctaagtctattttatacactcacatagtaaattaacttctaatcctgaaaaatgcactcatcatcgtaaaaaacattttgcccattgtgtctttcgttgaaatgttcatgttactaatttgtaagtcaattccgttatcatcgaatcattgtgataattcaattaatagttttgtcgttctacctaaccgatcaagttgatagacaactaatgtgtcgctctctcgtaaataatctaaacacttaacaagctctgtacgtttgacaccacttattctttcactatatacacacccacacccaaattctttaagtgtatcgatattaatctttcgttgatacacgatcataaccaattttagccatttaaataaaacctctcttcaacatattatatttagttatgactcaaaactcattgccgtatttttgattttgtattaatatatcaaggctatcatcatctaataccaaatgaatttctccacttcgaatatcaatagcaacgtttatttttgattctaactttttcaaataatctatgtcagtaaatatgtacttagaaagataatcatcttcttttttaaattcttctttatcaattgtatatccgttctctaaaatttttgataactctataagagtattactcctactttctttttttacattagacactacatagtttatgaacttttcaatcaattgttcttccaaatcactataatcttgtgtgtcctttttaaataattcaaacataatattattggataaattttcattatatattaatcgctcgtacataccagaagcgctagagttgataaatctattcagatcgttttgtatttcgttcaaatctatattccctttactatcgtaatatgaataattactcattaatttttttaagaaatctctcaaaccaaagtaaagataaatatttgaatactttctggcattatcgtagtcttttacatctcttttatagtgatctatcaacatattcaattcgaaattatatccatgattaaaatcaaactcgccattgtcatattttctttgaaattcaaacttgtatatttctgcaactttatcatcgcaattttcatctatatagttttcaaccaaataataagcacgctcaagagaaatttcaccataactttgtataaaagaggttaagtactctgttttctttaaaatttcttctcctttcttagttggtatatatacatatggtaaatctaagttattaataatatgaaaattgtcgtcaatacgtttaattaagtcaggtttattacctgttgtttttataccaaaactttttaaaatactttgtaattcaggtcttgtctttttatatatactaacttcaaaatcattagtcgttgttaataactcagcttcaattaatttttttattgaattcataatttgaacatcattattagcaaggcacttattagcaaatatctcttctccaaccaatctatttacattagtgtgtaatactaataaatcacgtgcatttacgctcactagctttcatctcctcatttttgcttttcaaatttattaagtatgaataaaaaatacatccgaacaaacaaaatctctatattctaattcgatttacatagattatacactaaaaaaatgattctcaatgcaaatgaatgtgtctctcatagtctaaaaactcgtatgtttcgaattttatgattcattgataatagtaccagttaaaagaactaagattgtaattatccccccttaaaattcaagaatatattttcttaatctatcagcaagaggttatatttcaaagtgtttatttttaaaacaacatctaaaagccattttcataataatgttaaatcattagaatgtataaagattccaattaataaaaatagataaaatgcaataaagttccaaatacttattattattcatcacaaattacgtgatgccctctacaacactaaatcaaggatgatatttattttatatacattagcattcattgtttgcttacccacattatcctgtttagtcttttttataactctagtcttgaatgtcatatttacaaagaaaaaaacactaaaatatttaaaactaacactatttattcactttgttcttttatagcaccttttatgtttattttcttgtattcaataaatagtatggagatgataatttaaagtagatatatttgaagtatactatagagtaaattatattggggaaatatgtaaacgaaccggttgattttatagtggattaacacttcatagagaatataatcaagaacaaaaacagtcaataggtgtgaatttttttaaagacggatctgttgctactaaaaaaagaagtatacaattcaatagttaaaccttaaaacaagaaatattattcaaaatcaatgaatttcctatcttattagttttaacaatatttattctcatagagtttgtccaattaaatatagatgattcaaatatttataagcatacaaaagagcagtaagacattttctaatagaaaataactttactgctctttgtacattactcatcaactattgtaaattaaataataaataactacctattttattattcagctaaaaaatgctctgctaaatattttgctgcgccatcctcttcattcgtgtatgccgttacatctgaagttaatgcttggatttcagggcgtgcatttttcatagcaactgtataatgaccaaattcaaacattgctctatcattgtcgctatctccaataactaacgtttcttcttgatgaataccaaaatgtgcaatcatttctttaatgcctgtacctttatcagtttgataagccattgtttccgcattaaatcttgatgaatttgaaacactaatctgtagttgcacatgattttgctttaattcatctctaaatgctgttattttttctaaattagaactgaatagataaatttttgaatattcaccttcaggaaacttagttacccaatctatcttaccagcaagcgcatcttgtcttgaagaccattcactatgacttacgccattaataggatcttgactacgaatcatatctcgcatccatgtttcatcttcttttaaagaaactctattaccttcaaaaggaaatacctcataataaatttgttggcgcttagctaaattagtaatttgttgcacttgagccaatgataaaccatgcttgaagataatttctccatctacttctccaattgttccatttgaactaatgatgccattaaccgcaaaatcttgaggtacaagttgatgtatttcagaatgcgaacgtcctgttgccaaaaatactttatatcctttctctctcaattgattaatgacatctttcgtatacgttgatgcttgattattttcatgtaaaattgttccatccatgtccaaaaatattgcttttacgttatccatattgccctccactgtccattttatcttaattaaattttgtcattattacttattatttgcaaaatatttactctaacattgccatagaaaatcgattattccatctttgaactgctacatttttctggaaaaatcgtgacatgttttcagaagttaatatgtcttctacagcgccttgttgaatactttggccatcttttagcagtaaaattttggaaaagttagcagttatttcttcaataaagtgcgtcacataaatcatcgcaagcgttggatatgaatctgacaatgagtcaagtatacttaacaacgattctcgtgcaataaagtctaaaccagctgctggctcatctaaaattaaaacctggggttgccccattaaagctcgtgcaatcatcactcgttgtttttcaccggtagataaataaccaatatattgttgcgctttagcaaacattccaactaatttaagtaattgatgtgcttcattacgtatctcatcatcaatatcttgataaacaccaattgatttaaaggcaccgcttatcaccacatcgattactctttcaccctcttgaaacttttccagtaaactatgagatacaaaacctatatgttgtcgtacagtctctgcagaataccctaccttgcctggcattttaccgaaaaggttaacagttccagatgttgcaggctcatacgcatttaaaatatttagaagtgttgtcttgccagcaccattcaacccatataatatccatttatcacctttagcaatttgccaagaaatcttttttaaaattgtttttccttgcttcattcgcccaatttgatctaattgaattaacatgcgaggtcacccctttattgctactccatacttctcataaaatcatattaacataacacccttaattgtcagactatttaaataaataaaacacttcatttttacgcatttctgccaaattaagatgaagtaaaagctaagtcgacctaaaaaagcacccttctagtcgattaatctaaaagggtgccatatactttaattttaatacatgattgattctaaaaaagtgaattattccacagtaactgatttagcaaggttacgtggtttatcaacatctaaatctctgtgtaatgctgcatagtatgaaattaattgtaatgcaaccactgatactaatggcgttaacaattcatgtacatgaggaatgacataagtgtcgccttctttttcaagaccctccatagaaataatacatggatgtgcaccacgtgctactacctctttaacgttaccacgaattgataaattaactttctcttgtgttgctaaacctacaactggtgtaccttcttcgattaaggcaattgtaccatgtttaagttctccaccagcaaaaccttctgcttgaatgtaagaaatttctttaagttttaacgcaccttctaaacttacgttatagtcaatagtacgtccgataaagaatgcattgcgtgttgtttctaagaaatctgtagcaatttgttccataattggtgcatcgtcaacaattgcttctattgctgttgttacttttgctaattctctcaataaatcaatatctgcttcacgaccatgctcttttgcaacgatttgagacaagattgataatactgcaatttgtgcagtatatgcttttgtagatgcaactgcgatttcaggacccgcgtgtaataacaatgtgtggtctgcttcacgtgataaagttgaacctgcaacattagtgattgttaatgatttatgacctaatttattagtttcaactaatacggcgcggctatctgcagtttcacctgattgagaaatataaacgaacaatggtttttcagataataatggcatgttgtagacaaactctgatgcaacgtgtacttcagttggtacgccagcccatttttctaaaaattctttacctactaaacctgcatggtagcttgtacctgctgcaataacgtaaatgcggtctgcttctttaacatcattgatgatgtcttgatcaattttcaagttaccttctgcatcttgatattcttgaataatacgacgcattactgctggttgttcatgaatttcttttaacatgtagtgtgcataaacacctttttcagcatctgatgcatcaatttcagcaatatatgaatcacgttctacaacgtttccatctgcatctttaataataacttcatcttttttaacaataacgatttcatggtcatggatttctttatattcgcttgtcacttgtaacattgcaagtgcgtctgatgcgataacattgaaaccttcaccaacacctaataataatggtgatttatttttagcaacatagattgtgtctttgtcttcagcatctaataaacctaatgcatatgaaccatgtaataatgacacaacttttgtaaatgcttcttcagttgaaagtccttgatttgaaaagtattcaactaattgaacgataacttctgtatctgtttctgaaatgaatgatacaccttgtaagtattcaccttttaactcttcatagttttcaataacaccgttatgaactagagtaaaacggccatttgatgattgatgtggatgagagttttcatgattcggtacaccgtgtgttgcccaacgtgtgtgaccgattccaacaggtccatcaaaatcgctactatcagcaactttacgtaattctgcaatacgacctttttctttaaatacagttgtattatcatcatttactactgcgatacctgcagagtcataacctctgtattctaatttttctaaaccttttaataataattctttggcattatcatagccaatataaccaacaattccacacataacgacattttcctccatattggaatagtacgcgtaaattatgatttattgccgataatttagattgacaatctgctttcataatataaataggaacatgctatcatcgcattcatccataacaaattaagcatagttatttttacaactatacaaattgctcacactgtactttccatattaatattttttatattcaatttctggcgatcttattaactttgtccattaagtcaccctaatgttttacttaataagctaacgaatgagccacatccgggatagcatccgccgatctattcgatcactatcctcctcgtctacaaatacatatattgcactctataaaggccactcatatattaacctttaatcttcaaatacaaatatttatttgcacaggcgctttaactgtactgccgaactttccccctttccattaatcattattgtacaacggtgttgttttgttttgcaaatattttcacaataaaattttaaaaatcctaaaacaatttttttgttttactttttcaaaatatctatactgtcacattgatgacactttatttaattttgtcacatttattttgacaaagttgatttttgtttatattgagtaacaagtaacctctctatacactatatatagtcacatatattaaaaaagaggtgtaaacatgtcacaaactgaagagaaaaaaggaattggtcgtcgtgttcaagcatttggatcattcttaagtagtatgatcatgccaaacattggcgctttcatcgcttggggttttatcgcggccatttttatagataatggatggttacctaacaaagatttagctactttagcaggaccaatgattacttatttaatcccattattgatcgcatttagtggtggtcgtttaatttatgatttacgtggtggtatcatcgcagcaacagcaactatgggggtcatcgttgcattacctgatacaccaatgttacttggtgcaatgattatgggtccacttgttggttggttaatgaagaagaccgaccaattgattcaacctagaacgccgcaaggttttgaaatgttatttaataacttttctgctggtattttaggatttatcatgacgattgcaggatttaaaattttagcaccacttatgaaatttattatgcatattttatcagtggcagttgaagcattagtacatgcacacctacttccacttgtaagtattttagtagagcctgcaaaaattgtatttttaaacaatgcgattaaccatggtgtattcacaccgcttggtgcagatcaagctgcaaaagctggtcaatcaattttatacacaattgaatctaaccctggaccaggtttaggtatcttacttgcttatatgatttttggaaaaggcactgcaaaagcaacgtcatatggtgctggaattatccacttcttaggtggtattcatgaaatttatttcccatatgtattaatgcgtcctttattatttatcgctgttattttaggtggaatgactggtgttgcaacttatcaagcaacaggatttggatttaaaagtcccgcgtcaccaggttcatttatagtttactgtttaaatgcacctagaggtgaattcttgcacatgttactcggtgtcttccttgctgcacttgtatcattcgttgtagctgctttaattatgaagttcactagagaaccaaagcaggatttagaagctgcgacagctcaaatggaaaatactaaagggaaaaaatcaagcgttgcttctaagttagtatcttctgataaaaatgttaatacagaagaaaatgctagtggtaatgttagtgaaacatcttcatcagatgatgatcctgaagcgctattggataattacaacactgaagatgttgatgcacacaattacaataatataaatcatgttatttttgcctgcgatgcgggtatgggttctagtgcaatgggtgcaagcatgttacgtaataaatttaaaaaggcgggcattaatgatattacagttacaaatactgcgattaatcaattgccaaaagatgctcaattagttatcactcagaaaaaactaactgatcgtgctattaaacaaacaccaaatgccatccatatttcagtggataatttccttaattcaccaagatatgaagaacttttaaataatctaaaaaaagatgatcaagcataataattaaataaattaaaaaatggaggataccgccatgttattgagtacacgtgaaaaagaaatgatagccctattgattaagtaccacggtcaatatatcactatacacgacattgctcagcaacttgcggtgtcctctcgtactattcaccgtgaattaaaaggtgttgaagcatatttaacttcattttcattaactttagaacgcgcaaacaaaaaagggctacgcattgctggcacagattctgatttaaacgatttgaagcaatcgattgcacaacatcaaaccattgacttatctgttgaagagcagaaagtaattattatatacgctttgatacaagccaaggagccagttaaacaatatagtttagcgcaagaaattggcgtttctgtccagactttagcaaagatgttagatgatttagagcttgatttaaataagtaccaactatctttatctcgaaagcgtggcgaaggcatttacttggtaggtactgaatcaaagaaacgtgaatttttaagtcaattaatggtgaataacttaaatagtactagcgtttattcagtaattgaaaatcattttgtctttcattcattaaatcaaatccacaaagactttgttgacttagagcgcatttttaatgttgaaagactattaatggactacctaagtgccttaccctaccaacttaccgaatcaagttatttaactttaactgtccatatcgtgctctccatttcacgtataaaaaatggagagtatgtcgcattaaacgatgatatttatgattctgtacaaaacacatttgaacacaaagtagcaagcgaacttgctgataaacttggtcaaatatatgacgtcacgtttaatcaggcagaaattgctttcattactatccatttacgtggagctaaacgaaaaaatcttaatgatacatcattaaataatcgttgtgaagaaaacaaaattaaagcgtttgttaacaaagtagaaatgatttccggtatgacatttgcagatttggatactttagtagatggactgacgctacaccttaatcctgcaatcaatcgtttgcaagctaatatcgagacctataatccgttaacagacatgattaagttcaaatatccaagactatttgaaaatgtaagattagctttaaatgattgttggcctgatttgatttttccagagagtgaaattgcttttatagttttacactttggtggctcgattaaaaaccaaggtaatcgatttttaaacatattagtcgtttgcagcagtggtatgggaactagtcgtctattatcaactcgtctagatcaagtttttagtgagattgagcgtattacacaagcatcagtcagcgatttgaagtcactagatttaagtcaatatgatggcattatttctactgtgaatttagacatcgactccccctatttaacggtaaacccattattaccagatagtgatatcagttatgtcgcacagtttttaaatacaaagtctacgttccaagagacgcatgataaatcatcaaacatgattgataaggatgatgttcatgttgaaacgaaagatgttgatggcaacacatcttttgaaaatgaacaaacttcatacttaacttcagttttcgaaaaacatttaagtgacgaaaaatcagaacaattattgcatcatatgcgttcgggtttaactttgcttgattcagtgaaaatagttagtaccgaagttaaacagtggcaaacatatatcgcagattatctatatcaatgcgatgtaataaacgatccaacgtcattcgctgaactactagagcaacgattgattgacaatccaggatggatattaagtccatatcctgttgcaataccacacctaagagacaatatgattaaacaccctatgattctaatcacagttttagaagaaccgttaacattgcctagtattcaaaatgacaatcaaacaattaaatatatgatttccatgtttatttctgacaatgattttatggcatcactggtaagtgacttgtccgaatttttaagtttgaaattagaatctattgatacttttatggaaaatccacaggaacttgaaacattattaagaaacaaatttttagaacgaattaaaaaacaatttatttaggagtgtacaaaatgagcgaattatttagtaatgacaatatctttttaaatgtaaatgttaacagccaaaatgaagcaattgaaaaagcaggtaaagccttagttgatagtggtgctgtaacagatgcttatattcaagcaatgaaagatcgtgagcaagtcgtatcaacatttatgggaaatggcttagcaattcctcatggcacagatgaagctaaaacaaatgtgattcactcaggtttaacattattacaaatccctgaaggcgttgactgggatggcgaagtagttaaagttgtcgtgggaattgctggtaaagatggcgaacatttagacttgttatctaaaattgcaattacatttagcgaagaagaaaatgtggatcgtatcgttcaagcaaaatctgcagaagaaattaaacaagtattcgaggaggcagatgcataatgaaagcagttcactttggtgctggtaacataggtcgtggtttcattggttatattcttgcagacaacaatgttaaagtaacatttgcagacgtcaatgaagaaatcattaatgctttagctcatgatcatcaatacgatgttattttagctgatgagtctaaaacaacgacgcgcgtgaataatgttgatgcaattaattcaatgcaaccttctgaagcgttgaaacaagcaattctagaagctgatattattacaacagctgttggtgttaacatactacctattattgctaaatcttttgcgcctttcttaaaagaaaaaacaaaccatgttaatattgttgcttgtgagaatgctattatggcaactgatacattgaaaaaagcagtacttgatattactggccctcttggtaacaatattcattttgctaactcagcagttgatagaattgtaccattacaaaagaatgaaaatatattagacgttatggttgagccattttacgaatgggttgttgaaaaagatgcatggtatggtccagaactaaaccatattaaatatgttgatgatttaacaccatatattgagcgtaaattattaactgtgaatacaggacatgcatatttagcgtatgctggtaaatttgcaggtaaagctacagttttagatgcagttgaagatagttcaattgaagctggcttacgccgtgttttagctgaaactagtcaatatattactaatgaatttgattttactgaagcggaacaagctgcttatgttgaaaaaataatagatcgtttcaacaattcttatttatctgatgaagtaacacgtgtcggacgaggtacattacgtaaaattggccctaaagatagaattataaaaccattaacatatctttataataaagatttagaacgcactggtttattaaatacagctgcattgttattgaagtatgatgatacagcagaccaagaaactgttgagaaaaataattacattaaagaacacggtttaaaagcgtttttaagtgaatatgctaaagttgacgatggcttagccgatgaaataattgaagcgtacaattcactttcataatttattgagctttgtttgaaacaagaagtttccaacgttattcgttaacaatcagtaataatgtagtagttcccttgaattaacaatattaaatttctgaacataaaaaatactcccttcaacatagacacttaacttgtgttatgtatgaaaggagtatttttgcgttaataatttgttttattttcgagccacagccacctattcaatggctattggtcattactaaaacaaattcatattaactgttagacttggttacttagtaaggaatatttccctatgaaataactagatgttcacattcttgaataaattttattcttcagtttgttggtctttcttagtgaatcttctaattaagaatgccatacctgcacctagagctaattcagcatatggtaaatcgtcattatgtgacataccagtatctggtaaagttttagcttgttgtttagctttattaacttttccttgttgagctgattttgtcttagcttggtggtcgtcagtgttagttacattaagcatatcttgattagcactattgcttccatttgaaactgtagctggagatgcattggcaccgtcgttttgcgtagctttattgtttgcagctgaaccaactgatttttgcgtatcattagtatctgctgttgccgtatcatctttttggctaacattagttgaagtcattttttcttttgcttcagaagatgcagatgttgatggtttattcgaaacttcagtatcagctttgcttggcgatttatctgcttcgttagatgcaacgttagtttcagacttaagttgtcctgcatcagtttgatttgtcgtactttcttctttatcttttgatgtattagaaggtacatttggttctgttatgtctgctgaaggcaatgtttcagttgttgattcaaccatactttgatttgttgaatcactaccatctttttctgccttagctttattttcagattttggttgtgcaaccttgtcattagttgattgagattcagcactattatttacttcagcattttgttttgaatcatttacagatgcattatctttgctatcagcagatgatgctgcttctgtgctcgcagttgttggagccgttgctgttgatcctgttggtgcattctcgtttgttgctgtagttgtactattgttatttgttgtgctttctgctggcgttgcattatcagtttctgttacaggtttatcagttgtgccgttattagttgattctacttctggtttactagttacatcgttatccattgtcggactgtttgttgatgcatctacactagaattgttattagcttgcggtttatcatttgcatcatcagttgctgatgttgctgttgtttcacctgttgccgcatcactattatttggtgttgtcggagaagcgtctgctttgccattagctgtcgtctcagatacgttaggttgtccagtattttctggtgttgcattagcatttgaatttgctgttgcatcattattatctataccattattagtatcattagcatctggatcattctgaggcacaatcgcttcaattgcaggtatcgttacattttgtaattcagcaacttctgcatttgtttgtgttttatctaatttatcagcaaatctgtcaaaatatctacctaaatccgtacgtgcaatttctttcgccgatgcatctgcatctgcatttttaattatttctatttgcttgttaaccacttctctgattgcttccaaagcatttttcttaacttcaggattaatacgttgtgctttaagttgttcaagcgcactatttttgacagtagcgatttctgcatttgtagtttgatcagaaatatcttcagttgcttttgataaaatgtcttctaaagcattcgtaaacgcttctttttcttcagttgtagcatcagcgttgacatttacacctgcttcaatctggtctagtgcagtttctaattcttcgatagctttttgtttttctgttgagtcgatttgaatgttatcaaatgcttcaagtccttgagctttcgctttttcaacttcagcagttgttgttgcatcagtaataccttgtttagcttgatctgtaatttgtttaatcattgctaatgcttcagttttttcttcagcagttaactggtcactttgatcaatagattctttcgtatcttctgctttaacttcaatagcttggttcgctttaggtttaacagtagcatctacttgaatagcatcaattgctgctttaccttgtgttaatgcatcatcaacgtcaccattatccacaccattattaatgctttctaatgcagtttgaacattttggtcaacttgcttaattgcttgttgcttttcatcttgtgttgcattagtgtcagctgaaatattatttttcttctgatctgcataagcatataaatctgttgtagctgattcttttttacctgttggaattgtgtaatcgttaatattatctaagtcattatgaatttgaacttcaatgtcatctttagaagtagcttgattaacattttgatccgcagtttgttttaattcagcaagtttttgtttcgcttcagcaatttcacttgaagtcgatgcgttagagttatccgcttcgtttactttagcattatatgcatcttcaattttagctaaagcatcttttttgtactcactaaatgttttaactgcattaattttagcttttccttctttaactgcattatcaacatattcatttgttgatgattgatcgacatttgttttcgcttgatttaattcagtatcaacttcttgttttgcatcattaatttcttgttgtgatgcatttggtgtttgttctatttgtgttttcttatcagctgcagcttgatctaattcttttttacctgctggtttcttaacaggatttgcatgaagttgttgaactttttgtactgctgtatctttagcagtagttacatcacctgtagtagttgctgcattaatattatttaaaccttcttcatatgctgctctaactggtccaatatcgttacctttttcttcattagtagtctcattattattaagtatttcagttattttattttgcatttcagttagcaattccgctcttgcattcgttttaacatctgttgatgcttgaattgggtcaattgcttgaattgcattatcttttgcagtgtttacatcatcgattgactgtgcattttcaatattttgattaccttgtgttaattgtgcgtctacttgttgatttgcttgttctttttcttcagtagtcgcatctgcagtttgtgcaataagcgctttttgttcgtttgcttttgttgctaattcatctttcgcaacatctttaattgttgtatctgcagtaataccttgaatatcagcaactgcttgatctttaatttgcgtaacatcattagttgtttgtgcatttaagatatcttgatacgctttttctttagcttttaaaactaaatcttttgctgcatttttctcttcagttgtagcaccagttgtattatcaattgcttgattttgagttgtcacagcttgatcaacatcatttttagcatttgatttaaccgctgttgctggttgcgtgctttgaattgaattctttccagcgtctttcgcctgatctacaccattatcatcagttgcagctgtaatattatttttcgcgtctgtaactgctgttgctaattgttgaatagctgcttctttttcttctgttgtagcgttctgatcattattgataacatttgtttgcgttgcttgtaattgatcaatttcatctttagccgcttgtttcttcacaacttttggtgttaccgcattaatcgctgcttctgcatttgctttagcttcatcaacttgtgcgttagtagttgctgctgaaatggcttgatttgctttaccattttcagtatttgcttcagcatcagctgcttgtttttcttcatctgttgcatctggcgtagcttgaatctcttgcaatttgttatttaaaattgctgtgatttcattacgtgcagttgcttttttattaactgttggtgttacttgatcaatactattttcacctgtcgttttcgcttggtctacatcattttgactattagcagcttcaatgttgctatttgcttgtgtcacagcattatctacgtccgcattagccgctgcaatttcttcagcagtaatgtcttgcgtttgagcgattgctgttttacgttcattcgctttcgtagcaattgcttctttcgcattatctttagttgttgttgctggctgaatcgcttcaattttagcaattgctgcttttttagccgcttcaacttccgcatttgtatgtgctgcatctattgcggcatcagctgttgttttttcagtttgaacttgttatttagcagctgctttttcttcagttgttgagccgttatttccatcaattgctgtttcttgagcttgtactttatctgcaattgcttgttttgctgctggtttaacatttgcatcaggtgtaatggctgcgattgtagcttcatttgtagtttttgcattatccacatcattgtttgctgcagcattatctatatcagcgtttgcagtaactactgcttgatccactttgtctttcgctgcttgttgttcttcagtagtcgaatcattcattgcttcaattgctgttttacgttcacttgctttttgagcgatttccgcttttgcatccgatttcttagttgtggcagcttgaacttgattaattgcagcaatactattgtctttagctgttgttacatcactgtttgtatttgcagcatcaagatttgttcttgcttcttgctttttagtatctaattctgtatatgcagcttgtttttcttctgtagttgaagcattgctattttgaatttcttgtttacgtgtattatatgcgttttctacttccgtatcagctgcaggtttaacttttgcttgtgtttgaattgcattgattttatctaatacttttgattttgtatcagcaacttcctgttttgatttaacaacttggatgtcatgtaaaccttgcttttgagctgcatctactgctgcatcagcttctgctacttcttcatttgttgcatttgaaactgtagcattttgagcttttctagctgttgcagcttgtttaacttcattataggcatccatttttgtttgcgtagagtcagtaatattttcaatttttgagatttcttcgtttttaactctttctaaatcttgtgcagtcgttgtcgcttcaattgctttaacaccagaaactttagctgcattaatacgttcaatagcttccgctacttcttcatttgttgtatcaggatttaaaggtgcttgatcaatttgtgcttgaacaacttcgtcaaattcttcaagagctgctgctttagctgttgtagcaggtgtagtttgattaatatcattgattgcttttgttttaatggcttctacttgtgcatttgttgttgctgcatcaatatctttaattgcctttgtttcaattttaccaattttatcatttgctacatctttttcatcttgtaatgatgcatttgactttttaatttgttgtttacgagttgtaactgcttggataatatcttgtttcgcttgaggtttaactgttggtgtaatcacatcttgttctaacactgcgataccattatctttttcagttgtgacaccttgtgctgtagtttgtttattaatttcagcgattgcattatttttatcattgttaattttagttacaagtgctgcaacttcatcttgcgtaacttttttactttgttgtgctgctgtaaccttttcttgagctttagtatctaattcagcaattgctgcttgattatcaattaatgcagcttgtaatttagttactaaaccatcaatatccgcttgagatgcacgatttgcagttttaacatgattcgcatcttcatttaaaatagtatctgcttgttgtttaagtttattgtattctgcaattgatgctgttgtgtaatgactattatcaacttgtgagtttacttgttgttgcaacgcatctttgttcatttcaaccgctactgaaaatggatctgcagttagtgtaacttctggttgcgcattattaattacaacatctgaagcagtacgatatgttaatttttcattaaaatcaatatttttaggtgtatcgatattcgcaacattaactttatatgataattttaaagatttatctgggaataaaacttctttagtgtgtgtaccacgtgccgttgtcacaccttggcttgtaaatgtaactttatttgcattttgatcataattaacagtcatatttttcaatactgtactgtcttcattaccattagggaatgttgtagttaatgaattattaacgtaagttacaccttgtggtaatgttacttcatatttaaattgatctgcttttaatgaagcaccaaaattaccattgttaccgatttcagtattaatagtatattctttattgttagttgctttcggtgctaaatctctatttttgacatataaatgtgatcctgagaatagacctacattatcaatgaatgaatagtatttataaccatctttatttgttgtaattcttgaagcatcagcaactgctgtattgtcaggaataaattgtaaatctaaacgatcagcatcagttggtactttaaataaatgtgcagtaccagtcttagcaacatttacagttgctaattcagtatttttcttagcatctttaataactaaatttgttgcaccttgcttactattcgtttgcatagtagtaaagttaataattaattctgaatctggttttacatttacagtttttgaaataccgttaaagttaccatgatctgtagaatcatttgcattcacacgacctaatgcagccacgtttcctttagcttgatagttttgagggttattcttatcaaacatatcgcttcgtcttaattctgagttaacgaaaccaatcttaccgttgttaattaatgaataaccatttactttatctgtaacagttacagttggatcttgtctattctcatctgttgatatggcaggatcatcaaatgttaatgtcgtattaatactgccttcaccagtattgctagcatttggatcttgagtttgtgcgtttgctgctacaggtgctgctggttgcgctgctgctggagcattcgctggctgtgtttgatttgccggtgttgcattattattaggtgttgcttggttatttccttgacctgcttggtttgccggtgttgcttgatttccaggttgtgcttgtgcagcgttattcggatcagcttgattaccttgtccagctggttgtgtatttggttgtgctgctcctcctgctggattagcctgtccaccttggtttgctggttgtactgctggttgtccttggttggcaggtgcagctggctgtgctgtaggattagcttgagcaccagcatttgcgttaggctgtgtattggcatcagctggttgtgctggttgattttgtgcaggctgattttgctctgctgcagacgctgttgtcgggttagtagatataaaagtaacagtggcaattaaagctgaaaaaataccgacattaaattttctgatactaaatttttgttgtctgaataaattcattaagtcatcctcctggttgattattctcgctgttaaatgatttcacttaatcaactgttaagataagtagtagcatctgcgttaaaaacacaaagcaactctatctaattaaaattaattttatcatcattatatattgagtaccagtgtattttatattacatattgattactttgtttttattttgtttatatcattttacgtttgtactataaattatttctacaaacacaaaaaaccgatgcatacgcatcggctcatttgtaatacagtatttatttatctaatcccattttatcttgaaccacatcagctatttgttgtgcaaatctttcagcatcttcatcagttgctgcttcaaccatgacacgaactaatggttctgttccagaaggtcttactaaaattcgaccttctccattcatttctacttctactttagtcataacttctttaacgtcaacattttcttcaacacgatatttatctgttacgcgtacgttaattaatgattgtggatattttttcatttgtccagctaattcacttagtgatttaccagtcatttttattacagaagctaattgaataccagttaataaaccatcaccagttgtattgtaatccatcataacgatatgtccagattgttctccacctaagttataattaccgcgacgcatttcttctactacatatctgtcgccaactttagttttattagatttaattccttcttgttcaagcgctttgtaaaaacctaaattactcataacagtagaaacaatcatgtcattattcaattcttgatttttatgcatttcttgaccaataataaacataatttggtcaccgtcaacgatttgaccattctcatctactgctatgattctgtctccatcgccgtcaaatgctaacccaaaatcactttcagtttcaactactttttcagctaatttttcaggatgtgtagagccacatttctcattgatattatatccatcaggactacatccaattgtttcagtatctgcttctaagtcaccaaataagaatggcgctagtgatgatgttgaaccatttgcaccatctaaagcaattttcaaaccttcaaagttaacatctactgttgattttaaatagctcaaatatttttgtgccccttcaaagtaatctgaataatgtacaatatcattgccaactggtcttggtaattctgggttttcttgatccaataatgcttcaatttcattttcttgttcatctgatagtttaaaaccatctgatccaaagaatttaataccattatctgcaactggattatgagaggctgaaatcattacacctaactctgcacccatatcgcgtgttaaatatgcaacacctggtgttgaaataatacctaatcgcatcacttctgcaccaattgaaatcaaaccagctattaatgctgattctaacatttcacctgaaactctagtatcgcgacctacaagtacacgtgggtgtttttcacctttattatgtgctagaacatagccaccgtatcttcctaatttaaatgccaattcaggtgttagttcttggtttgcgacacctcttactccgtctgtaccaaaatattttcccattgtttactctcctttaatttagctatttattttacatttatataagccttcgtttcacttggttgtgctttagtgacatgttctggtaaattgatttttacagtcttttcagttgattctgaaataccatctaaatctacttctgcatcaacttcgcttatattttgtaagtcatctcgactaccgaagatttcaatttctttatcttctaaatcaatcgaacttaactctttatcatctgctaaactacctttctgtttaacatttactttaacctttttgctaaaaggctctactttaacttgtaaattcacttcattaggttgaatcgatacatttaatttattcagttttttatcaaaagccgttacttctgcgacatcttttgtgtcaccattaatctttttattagttttaaaagtggcttttaaataagcgatatcattcaattgttcttctccacctgttactttaactgtttgtggtgaaacttcttgctttgtaattttataaagtggatcaatatcactctgacttacatcaggttgaactgtcatctttttagttactttgttttcaagcgtaatatttgctaatttaggttttacagaataatgaatgtcatcagctaaccctttaacttgatacttctcttgatattttccagctttagcatttgataaatcaatcactactcttaaatcttctggattttcaatttttattatctttgattgtggtcctgaaatagtcacattaactgtttcaggcgcttttgttaaatgcaaatctttagtgttataaagaatttcaacgggtacatcttgaatcgttttactagacttttgaccaagattaccagtgttaaagatatttccaaaaacattgttaacagataaaaagaaaaacaatgccaaaagaaaggcaataaatctcaagccccatttactttctagcatattatttcacacctttcttttgaaagcgtgtgccaaaccaatgttcagcaagcaactcttcaaaaatttcgtttgaaatgtctcgtcgtaattttccatcaaatgttaccgaaatatcaccagtttcttcagatacaataacggtaaatgcatcagatacttctgaaataccaaccgcagctctatgtcttgtacccaaacttttagatatcttaggactatcagacaatggcaaataacttgctgctgctgcaatcttcgtgccttgaataatcattgcaccatcatgtaaaggtgtgttaggtataaagacattaattaaaagttcttgcgaaatatttgaatccattgcaatacctgtttcaatataatcttgaagacctgtttctttttcaaagacaattaatgcacctatacgtcttttagccatatattgcacagcctttgaaaccgattgaatcaatttctcttcatctttactatacgtattagaagtatagcgttttaaaaagctacctctaccaagttgttctaacgcacgtctaatttctggttggaatattactattaaagctaataccccccattgaataacgatatcgaataatttagatgttgcagtcaagttcaatatcatacttatctgctgaccaataacaattactaatatccctttaagtaattgtatcgctttagttcccttaaagaccgtgatgagaagataaagtacataccaaactatcagtaaatcaaggatactcgttacaatttttaacgtactgaggttttgaaaaaagttggaaaaatccataacatctcctccgggtaatatttttccataatacccattataccaatcatttacatcactgtcatacgaacatatatttaaatagaaaaaatttattttaaagattataactactcttaatcattttagtgaattaaaaaaagtagtgcaaaaagcaaaatatactttatacactacaaatcatttatttataataaagtttcaccaaaaaatgttccaactaatgaaaccgcttgttcagcagtatgattattactgtcaatcaatggatttacttcaactaaatccattgaggaaattaaatgtgattgatgcagtaattccaatgcaaaatggctttctctataactaagaccacccaaaactctagtaccagtgcctggcgtttcaagcggatctaaagcatcaacatctaaagataaatgaacgccatcaacattgcgtgacttcaaatattctattgtattttcaattacttcctttatccccaatttatcaatatctgacatagtaaatgttttaatattatgatctttgataaattgtctttcacctttatctaaatctctcataccaattagtacgatgttttctggcttgattacattactatttaattctaaaagttctttgggaccttcgcctgtcaaaatccttagaggcataccatgaatatttccacttggtgactcttcaggtatatttaaatcaccatgtgcatcataccaaataacacctaaattattataatgtttacttattgctgatactgaacctaccgcaatagaatgatctccaccaagaactagaggaaatctgttattttcaattgatgctgaaacctctttatttaatttttgattaacatctataatttcatcataatttcttaatcctttttgttcactatgaaatttttcaatgttcacagcaggtaccttaatatcccccttgtcatatacatcaaggtctaattgctttaatcttgaaattaatccagcatatctaattgctgttggtcctaaatcaacacctaattttctttgtccaaatgttgatggtgcacctataatatcaattgcttttgtctttgtcataagcgtccccctttgctctatgtaattaaagaataatgtatgcgcttaccattatcaagcaatagctacacatataatctgtttatcttattacttcataaaaaaaggttcttcatcttttatggtgggaaggtaaaacttcctgctttttttaatacacaaaaagcgcaattgcctctataatttaaagtgaccaaacccaaactaaaggagacaagtgcgcctatgtgtaatgataccttagaattactaagaataaaagatgaaaatataaaatatataaaccaagaaattgacgtcattatcaaaggaaaaaaagcaacagtggttaatgctgtactaacgtataagccttcggcctgttattgttgtggagttaaaaatgaaggacaaattcataaacatggtaagcgtgtttctcgtattactttacttaaaactcaagggtataacacatacctcaacttagctaaacaacgttttaaatgcttagaatgcaatggcacttttactgctaaaacgtcaattgttgatgagtcgtgttttatctcaagatgtgttactcaaaaagttatagaagaagctactaaagttaaaacagagattgatactgcagaagataactgtatctctccatctactgtaagtcgtattagaactaaagcggctaattcattacgaattaaaccctttaattgtttgccagaacacatcgctatggatgaatttaaaagcgttaaaaatgtaactggatcaatgagtttcatttttatagataatgatactcatgatgttatagatattttagaaaatagaactacaagattcttgcgtgcctatttcgagcgattcgatttaaaaaatcgacaacaagttaagacggttactattgacatgtatgaaccctatgtccgattatttcgcgacctatttcctaatgcagctattatttttgacagattccatatcgttcaacatttaaatagagaacttaataagtatcgtgtacaagttatgaatgaataccgtaataaaaaaggacctgattatacaatttttaagaataactggaaagtcctattgatggatactagtaaaaccatatttagtaaatacagatggaataaatcttttaaggcttataaacgctcatctgacattgtagaattcatgctttcaaaagacgatatactacgacactcctacgaacttgtccaaggattacgaaaagacctaaggttatgtaattggcctaaatttattaatcgtttaaattcagttagtaaaaagtctgtgagtaagggtgtatggaaagtggttaaatattatagaaaacatcaaaggatgttaagaaatacaatttattacccagcatttaataatggtgctatagaaggaattaataataagataaaattaatcaagtgaatttcttttggttacagaaatttcaacaactttaaagcacgtataatgatgattttcagcttgtacaaaggagaaaaaaagaagacaaccaagcccaataatggactggccgcctaataataaaagctctaaaagttgtattttaaaaatagttctttaaattatatacccaccacatttggtggagaacctaaaaaaaagcacttcccaaaaatggaaagtgcaagtagtgagccatagaggattcgaacctctgaccctctgattaaaagtcagatgctctaccaactgagctaatggctctaatggctgggctagctggattcgaaccaacgagtgacggagtcaaagtccgttgccttaccgcttggctatagcccaatatatagatggtggaggggggcagattcgaactgccgaacccgaaggagcggatttacagtccgccgcgtttagccacttcgctacccctccagcttattcatataatttaataatcaaaatggtggagaatgacgggttcgaaccgccgaccctctgcttgtaaggcagatgctctcccagctgagctaattctccaaaataatgactcctacgggactcgaacccgtgttaccgccgtgaaagggcggtgtcttaaccgcttgaccaaggagccatggctccacaggtaggactcgaacctacgaccgatcggttaacagccgatagctctaccactgagctactgtggattaatattatgcctggcaacgttctactctagcggaacgtaagttcgactaccatcgacgctaaggagcttaacttctgtgttcggcatgggaacaggtgtgacctccttgctatagtcaccagacatatgaatgtaatttatacattcaaaactagatagtaagtaaaagtgattttgcttcgcaaaacatttattttgattaagtcttcgatcgattagtattcgtcagctccacatgtcaccatgcttccacctcgaacctattaacctcatcatctttgagggatcttataaccgaagttgggaaatctcatcttgaggggggcttcatgcttagatgctttcagcacttatcccgtccacacatagctacccagctatgccgttggcacgacaactggtacaccagaggtatgtccatcccggtcctctcgtactaaggacagctcctctcaaatttcctacgcccacgacggatagggaccgaactgtctcacgacgttctgaacccagctcgcgtaccgctttaatgggcgaacagcccaacccttgggaccgactacagccccaggatgcgatgagccgacatcgaggtgccaaacctccccgtcgatgtgaactcttgggggagataagcctgttatccccggggtagcttttatccgttgagcgatggcccttccatgcggaaccaccggatcactaagtccgtctttcgaccctgctcgacttgtaggtctcgcagtcaagctcccttatgcctttacactctatgaatgatttccaaccattctgagggaacctttgagcgcctccgttaccttttaggaggcgaccgccccagtcaaactgcccgcctgacactgtctcccaccacgataagtggtgcgggttagaaagccaacacagctagggtagtatcccaccagcgcctccacgtaagctagcgctcacgtttcaaaggctcctacctatcctgtacaagctgtgccgaatttcaatatcaggctacagtaaagctccacggggtctttccgtcctgtcgcgggtaacctgcatcttcacaggtactatgatttcaccgagtctctcgttgagacagtgcccaaatcgttacgcctttcgtgcgggtcggaacttacccgacaaggaatttcgctaccttaggaccgttatagttacggccgccgtttactggggcttcgattcgtagcttcgcagaagctaaccactcctcttaaccttccagcaccgggcaggcgtcagcccctatacatcaccttacggtttagcagagacctgtgtttttgataaacagtcgcttgggcctattcactgcggctcttctgggcgttaaccctaaagagcaccccttctcccgaagttacggggtcattttgccgagttccttaacgagagttcgctcgctcaccttagaattctcatcttgactacctgtgtcggtttgcggtacgggcacctattttctatctagaggcttttctcggcagtgtgaaatcaacgactcgaagacacaatgtcttctccccatcacagctcagccttaacgagtaccggatttgcctaatactcagccttactgcttagacgtgcaatccaatcgcacgcttcgcctatcctactgcgtccccccatcgattaaaacgattataggtggtacaggaatatcaacctgttatccatcgcctacgcctgtcggcctcagcttaggacccgactaacccagagcggacgagccttcctctggaaaccttagtcaatcggtggacgggattctcacccgtctttcgctactcacaccggcattctcacttctaagcgctccacatgtccttacgatcatgcttcaacgcccttagaacgctctcctaccattgtccaaaggacaatccacagcttcggtaatatgtttagccccggtacattttcggcgcagtgtcactcgactagtgagctattacgcactctttaaatgatggctgcttctaagccaacatcctagttgtctgggcaacgccacatccttttccacttaacatatattttgggaccttagctggtggtctgggctgtttccctttcgaacacggaccttatcacccatgttctgactcccaagttaaattaattggcattcggagtttgtctgaattcggtaacccgagaggggcccctcgtccaaacagtgctctacctccaataatcatcacttgaggctagccctaaagctatttcggagagaaccagctatctccaggttcgattggaatttctccgctaccctcagttcatccgctcacttttcaacgtaagtcggttcggtcctccattcagtgttacctgaacttcaacctgaccaagggtagatcacctggtttcgggtctacgaccaaatactaaacgccctattcagactcgctttcgctacggctccacatttactgcttaaccttgcatcaaatcgtaactcgccggttcattctacaaaaggcacgccatcacccattaacgggctctgactacttgtaagcacacggtttcaggttctatttcactccccttccggggtgcttttcacctttccctcacggtactggttcactatcggtcactagagagtatttagccttaggagatggtcctcccagattccgacggaatttcacgtgctccgtcgtactcaggatccactcaagagagacaacattttcgactacaggattattaccttctttgattcatctttccagatgattcgtctaatgtcgtcctttgtaactccgtatagagtgtcctacaaccccaacaagcaagcttgttggtttgggctcttcccgtttcgctcgccgctactaagggaatcgaattttctttctcttcctccgggtactaagatgtttcagttctccgggtgtgccttctgatatgctatgtattcacatatcgataacatgacataactcatgctgggtttccccattcggaaatctctggatcaaagcttacttacagctccccaaagcatatcgtcgttagtaacgtccttcatcggcttctagtgccaaggcatccaccgtgcgcccttaataacttaatctatgtttccatcctacaggaaacgcgttattaatcttgtgagtgttctttcgaacactagcgattatttcttatgaattcaagcttatttaaaactctttattcactcggttttgcttggtaaaatctatattttacttacttatctagttttcaatgtacaatttctttttagtcaagcgctcgcataagcaatatcactttaaccaaaaaatatttgaatgttaaataaacattcaaaactgaatacaatatgtcacattattccgcatcttctgaagaagatgttccgaatatatccttagaaaggaggtgatccagccgcaccttccgatacggctaccttgttacgacttcaccccaatcatttgtcccaccttcgacggctagctcctaaaaggttactccaccggcttcgggtgttacaaactctcgtggtgtgacgggcggtgtgtacaagacccgggaacgtattcaccgtagcatgctgatctacgattactagcgattccagcttcatgtagtcgagttgcagactacaatccgaactgagaacaactttatgggatttgcttgacctcgcggtttcgctgccctttgtattgtccattgtagcacgtgtgtagcccaaatcataaggggcatgatgatttgacgtcatccccaccttcctccggtttgtcaccggcagtcaacttagagtgcccaacttaatgatggcaactaagcttaagggttgcgctcgttgcgggacttaacccaacatctcacgacacgagctgacgacaaccatgcaccacctgtcactttgtcccccgaaggggaaggctctatctctagagttgtcaaaggatgtcaagatttggtaaggttcttcgcgttgcttcgaattaaaccacatgctccaccgcttgtgcgggtccccgtcaattcctttgagtttcaaccttgcggtcgtactccccaggcggagtgcttaatgcgttagctgcagcactaaggggcggaaaccccctaacacttagcactcatcgtttacggcgtggactaccagggtatctaatcctgtttgatccccacgctttcgcacatcagcgtcagttacagaccagaaagtcgccttcgccactggtgttcctccatatctctgcgcatttcaccgctacacatggaattccactttcctcttctgcactcaagttttccagtttccaatgaccctccacggttgagccgtgggctttcacatcagacttaaaaaaccgcctacgcgcgctttacgcccaataattccggataacgcttgccacctacgtattaccgcggctgctggcacgtagttagccgtggctttctgattaggtaccgtcaagatgtgcacagttacttacacatatgttcttccctaataacagagttttacgatccgaagaccttcatcactcacgcggcgttgctccgtcaggctttcgcccattgcggaagattccctactgctgcctcccgtaggagtctggaccgtgtctcagttccagtgtggccgatcaccctctcaggtcggctatgcatcgttgccttggtaagccgttaccttaccaactagctaatgcagcgcggatccatctataagtgacagcaagaccgtctttcacttttgaaccatgcggttcaaaatattatccggtattagctccggtttcccgaagttatcccagtcttataggtaggttatccacgtgttactcacccgtccgccgctaacatcagagaagcaagcttctcgtccgttcgctcgacttgcatgtattaggcacgccgccagcgttcatcctgagccaggatcaaactctccataaaaattatgatgtttgattagctcataaatactaaataatgtttgtaactaatagttacgtttttggaattaacgttgacatattgtcattcagttttcaatgttcattaatgttcaatctcttttattctacttcatttatttcttgaagtcaataactttttgaacgattactttatttattctatattgtttttatagttatttcaatggtaagttttacacttttgaaattcttctttaaaaacaactgcgtcgtttttgacgactttatcatattatcaactttggaatttaaagtcaataacttttttaaaaactttttgtgttcacaacccgcttctttttcaacgcgtttattgcttaacacaagaacttattttaccagcattccaaaacaaatcaacataaaaacgtacaaaataaaagtaattttgtacgtttagcatatattatacctatttatttgtagcagctataactttttgtgcaatcgagctataaattttacctagacgatcatctgattgatatattgacggtgcaaaatcttttggattccaagatggttgctctaaaggtaattccccaagtaattgagtattaagttcatcagctaacttagtaccgccacctttgccaaagacatattctttattacccgtctctttactttcaaaataactcatgttttcaattacgccaagaatagaatgatccgtatgttttgccatcgcacctgcgcgagctgcaacaaatgctgctgtaggatgaggtgtcgttacaataatttccttacttgaaggtaacatcgtatgaacatctaaagctacatctcctgttccaggtggaagatcgagtattaaatattcaatgtctccccatttaacttctgtaaagaaattcgtcaacattttacctaacattggccctctccatataactggcgcattttcttccacaaaaaaggccattgatataactttaacgccatgacgttcaactggaattacttccttccctttaattccaggcttttcatcaatacccatcatatctggtacactaaatccatatatatcggcatctactaatccgacttttttcccttcacgagctaaggcaacggctaaatttactgcaacagtagatttaccgacaccacctttaccggaggctattgcaataaattcgactggattattttgagataataggccttctatcgttttaggtttattttcttcttttggtttaaattgatttactttttcttccggcaatgtttcaaatcgtataccgaccgttttcgcaccgttttcttttaatgcattaacaacagccatctgtaaatctaattgcggtgcaccacctaattgtgccattgctaatttaacactcacatgttctttttcttccttaatagaaacttcaacaataccttctgtttcttttaaaggcacatctataataggatctttaatttctcctaccaattctttcacttgatctaccgttaacaaagcaaatcccccttaatcattttaagacatctacatcatagcaaataacaatttttgcttagtctatcactaaaagtataaaactttttattaaataaaaaaagcagttagcctattattttaaatagaccaactactataattattttaaaatttccttctattactttctatttctttaggttctcttataaaaagtgctatcacataagctgccataacaagcacagctacaaaagcaaatgagatatccacccctatagcaatggattgctgtttaatttcagttgcagttaaatgcgatggcgatgtagataaaaatatttttgcaccaaaactcattaatgtaaccattaaagctgtgcctagtgaaccagccattacacgaccaaagttcataatagccgtgccatgtgagatttcttcatttctcaaagaattaattcctgtagtatttatcggcatcatgagtaaagaaactgaaaacattctaattgcatatacgactattaaatacgtataagatgtgtctgtatgcaagaaacacaacataattgtagtaattgttaaaattgtaaaaccagtataaatcaatggtctaggaccatacttatcataaaatttacctgtaaaaactgacataataccatttattattgcaccaggcatgataacaagtcctgataacaaggcagataaagataaactgttttgaacatatagcggtataagcagcgcaggtccaaccattgacatcattataatcattgaactaatcgtacataatgcaaatgttctatttttaaaaacccttaaatttaaaagtgcattagtaatattaaattgtctacgtataaataaatagataataaccatacttaatatcaacgcacctattactattggacttgtaaatcctaaatctcctgcactactaaatgcgtatagcattaacccgaacccaatagttgaatacattactgaacgcttatctaatttcgtatatttcacttcattgtaactcgagattgaaaccaaaccgaaaacaaaggcaagtatagcaattcctaaaattataataaatggaactcgccaactcgcttgatcaataattaatcctgtagctgtaggtcctattgctggtgcaaattgaattactaaacctgctagtcccattgcaaaacctcgatgttctttactgaacaatgtaaataacgtaaattgcattaagggcataagtacgcctgcacccatcgcttgaattacacgagctaacattaaaactccaaaattcggagctaaggctgcaacaatagaacctaataaaaatgtccccatcgccgctaagtataaaggtctagttttaattctatccattagatatgccgtcagaggtatcatgacgccattaacaagcataaacccagtaactagccattgcgatgtactttcattgatatttaattctctcattatactaggtaacgctgtatttaataatgtttgatttaaaatagctacaaacgcactaatcaacataacagcaactatgaagtttcgtctccgggttgttaattcaactttagccatcataattcctcctttttaaaacagatatacacttgtccctttaatacgtatagccatgaacataatgggagtagtactcaaataataaagaagcactacataataaatcattattggttcttacacattaggcacagctaatgtgtacttaaaaactaacaatataacattgtagggcctaataatttattttatgtctcagactcatacaatggttatttaacttatttaccacaaattgagcactaagactcactattatcgattcttctattgaacaaaaagaagttggaacacatatgtgccctcaacttcagatatctattttctattatttaaatttttactttcagggtaaaattgaagcttacaaacatataagaaccctataataaccatgatgacccaaaaatcgatattgatatacacatagttcagatgaataataaaataaaataacgttgttgcaactgtgtaagaaatcaaatgaaaagtcgcgcctctaaaatatgcattttcaggcaacatttttctaaaataatccattaaatgctcgactgcaaatatgatgaagtacccaaagattatataactgccataatataataggttatcgtacatacttctattatatgtaaagtcacccaacctaaaataaataagtattctacttaatccatataaaccaaaccctagaaatgttaaaaaaatcgcaccagaaagtacaaaaataaagagaacaatcattgtagttaacaagttataaaacttatgtttaagataattcacaatcattggcctccttattaataaaatattgaacgatttatctagtatctaggaaatttattatttcttactttaattacactacatcaattttaatcataattctattcttttgattgagatgactgttctttaaaaaatacgacccataaaacaataagcccaatgctaattacagcaacagcacttaacacattgtgtaagtttggaccaaagattcctgattgtatcgcataaagatatcccattattgttgaacctattgatgccccaagatttttagttaatccataaaatgacatcattttcttcatttgtaatgggctagtttcctcttggacaatcacactatctttcgtataaatatatccaaaacttaatcctgccaaaattaacacaaatgctataagtaccggcaatttaataccaaatgaaatgataatactacttactagtagcaatgtaaatgatagtaagtaaataactttccttgatagttttgcttcaattcgatgtaaattaaaattcaatgtaatccaagctacagataaaggaaaaataaccaatccactttgcaatggagataatcctagttgttcttgaaggtagactggaatatataaattgaatcccattaaacaaatagctgttagaaggtcagttataaaaactaaagtaatcgaacgattaaattcaaccacaggtaaaaatggtgaagaaacatgtttttctactttaaataaacacattgccacaacgatagctaagataaaactcaagaaatttaaaagtaacagctgttggtttaataaagcaaacataatcaatccaataaatacataaaatagcgtgagccctttagtatcaaattttgatttagcaactgtttcttcctctggaaaatgaaatgtccatataactaatataatggcaatgatcgcaatcggtatatttatgtagaataaccaatgccatgttgcaaattctaatataccaccacctagaagtggcccaatgatactcgaaataccccaaacactgccaactatgcccataattttatatcgtaacggaatttcaaatgctaactttggaacaatttgcgataatgacatcaatacacctgatccaaaaccttgtatcacgcgtgatataattagcatagtaaaattagtacttaaaccacacataaaactacctatactaaataaaagtaatcctgcaattgccacataaataattttaaatctcgaaagtaattcgcccactataggattggcaattactaatgcgataaaatacgctgtgaaaattaatgaaattaaatttcctgcatttaaatcttgtttaattgtaggtaatgcaagcgaaataatagatgattcaatcgctgacataaacataattaatattaaagctataacagttatgattgactttaatcgcatgaaatacctccttctatatatttatttataagattttatttacaaataattggttttcatatgtataaacacttttgactttcaaatcttaacgataattctattacaatacaatcccctattagaatgatttatgtaataaaaaaagcggagtttcccccagcttttctaaacgactacataaaatataagattgcaattaaatgcaatagtgatgctattacaataaaaatatgccaaatcatatgaaaatatggtctattcttttgtgcataaaaccatgcaccaattgtataagacacaccacctaagaaaatgaataatatgaatatccatgatgtgcgaataaaaataattggtaacaagataatacctacccagcccatcactaaatagacaattaagcttaacttttggttaactttgacagctatggatttatataaaatcccccaaagtgtcgttccccataataaaataaatactgtccaacctatccaaccacctacaactgttaacaaaataggcgtatatgtaccagaaattgctacgtaaatcatactgtgatcgataatccttaaaatatatttatgaggtgtttcattttgcatagaatgataaatagtagatgaaataaacatcataaagatagaaataacataaatagacatactcacagacgcaagcgtaccatgtgcaatataactgtgcacagccgcatagggtaacactaataatgttaacaaagctgcaacaccatgagatgccgcattaccaatttcttctccaaatgataaagggatgatatccttaaatgtttctacgattgtgtcattactttttttagttgatttggacatcatagtcaccgcctatcattaaattaaacccattctacgtaaatcttctgttgcagttgcaacactatctttaccttctttatttttaagaggtgaaaattcttcttctctaggaacttgtaacgtgacaaaactagttccataagtaaatatgtcaaaatagaacaattcgaattttaaagttggttgttcaataacaccaaagttctcatctaattgcttcaaattcttaatagctaaatgataaggtaactcacgatttacagcgtttaaaataaaaccaagtttaaatgcatgaataccgatattagcattgttaaattgatttgcaacttctggatctaattctgaatactccagtactgtatctttacaatcgacattaactaaacgtccaacactttctcctggttttggttgaatcgttttagaagtaatatcgtaatcatgttctaccgtaaatcctgcaaatagtggatccaacactcttactaaaacattgtcgatattattcaagaaaatatacttaacgccattattagacatttcttctaagtatcctgccttgtctaaagatttaaacacgccaccattaccattcggcgtttccataatacgaccctgttgatttaaaattaacttcccttcttcactaagcgccacaatattatcttgtttaaagaaatggattgcttcttgatcatatccaaaataactatgtgcttcgaaataagctaaagtttcttcatgattgatatcacttgtcataatataccattgaatcgtatgtccagattgatgattcaatgtttttaattggttagcttgaagttcaaataaacttacaccttcaatttcaaacgaacctttagggcccttgtaaccaagtcttgttccttgaccacctgccatcaaaagtactgcaaattgtccttctttaatagcttgaagtccttgttcctctaaacgcttaatctcatcatcactcatttgtgatttaatatcatatttcacttcagaaactgcagatacatcatctattgttttcttattgatgtataaatcgttatataatttggcaataaaatctaaatctaatgacgctaccttctcttcaagtgcttctttttcattgttactcattattttttcatattcacacaaatgatcttgtttatatttagctaattgatttttatctagcattttatgcctcctgctgagtttgtaacctttaataatttattttctataaaaacttagtattccagttgcttattatatcattgatgaaaggctgaaataaaacataaactgttccgaccattaacgctgtagctaaagataagtctacaagtccacctgttttaaattgaatcggtgtcttcacattaaacggtaacggataaaataatttcacgccttttggtgttatcatatctagtataacatgtgacactaatccaattataattgctgccatataataattaggcgtctgaataatttgcaataaaaatgctatgattgcgataaataatattgaatgcgtaaaggttcgatgtccaaagatcaatctcacaaaaaaactaattaccttaaaccttctgccaatcttactttgagtgtgacatatatcgggtaataagctagctagagttgctagaatgataaccgtaaccgacgaaaaaatatccgtttgaaaatattgtgttgttagcgctccaacgagcatgccgcatgaagcatgtgttttacctgtcatatttgttctcctttaatactcacattttaccacatccctaacaaaaacacgaacatattttcgggttaaaattcattagtatgacacaatttaaaaaagtatcacataactcttgaaaacgattacaaaatcgtttatgatgtatttacaaaatatttaaaggatgtgtttgaataatggcaatgacagtaaaaaaggataataatgaagtgcgtattcaatggagagttgctgatatcaaaattcctacaagtgaaattaaaaatattacacaagaccaagatattcatgcagttcctaaattagacagcaaagatgtatctagaatcggctcaacgtttggtaaaacgaatcgcgttattatcgatactgaagaccacgaatacattatttatactcaaaatgatcaaaaagtttacaatgaattaactaaataaattgtataaaaaaatcattcatggtgagggcttcatgaatgatttttttaattgattcaacacccagcataaacaaatacaaaaggacaactgttcccataattttaacagttgtcctttttcacatatatttataacaaaagatgtgccatcaaagaaataattggtagtgtaatgattgttctaatcaagaaaatcataaacaatttgccgatgcttacaggaatcttcgaaccaagtatgacgccacctacttcagacaagtatattaactgcgatatactaagtgccccaataacaaaacgagttatatcattttgtacaccttcaattaatatagaaggtaaaaacatatcggcaaaaccgataataatcgtttgagaagcctgtgccgcttcaggtatttgcattaactctaaaaatggaacaaaaggtttacccaatatgacaaaaaagggcgtgtagttcgcaataatggtagcaatagtaccaatactcattactacaggcaaaataacaaaccacatatcaatgactgtttttaatcctgacttaaaaaagtcaataacgcccggtgctttaatacctacttctgttgcagtatcaaagccatgtctcaatgccgtctttccttctggcaatgcctcagtacgcgcactttcaggtacctccttagcatactcatcaggaattttatttaaaggccaaattcttggcataatgactgctgcaacgaggcaggatactatcactgataaatagaaagcaaaaaattgattttgcatgtgcactgtttcagcaactacaattgcaaaggtgatagaaactacactaaatgtcgttgaaataactgttgcctcacgacgagaataatatccttcaccatattgtctacttgtaattaagacaccaacagttccgtctccaataaatgatgctaaattatctaccgtcgaacgtcctggcaatgtaaataaaggtctcataaccggtctaaaaataggacccaacatctctaacaaaccgtattccattaatagcggtaaaaatagagctgcaaataagaatactgccactaatgttggcaataaacttgagaacaataatccacccgtttcatctgagtaaataacctttgaaccaattcgtaaaaatgtcatccatgcaaaaacaactgctaatattcgtaaaattaaccaaccaattctaacgttaaaagcattgttcattagcccgtcaggtttcaatttatcttttaaaatagttgaacaaatcagagttatgatacccgataaagtaattatcgtcacaattaaaaatggcattacgccacctaatacatctttaagcacgcctgctaaaaatgccacgggcaacgttgtttgcttctgtccatcttgttcgactggaattggtactaaaaataataagataccaattaaagacatcgtaataaacttaagtctcccaataactatctctttccttgaaaagctatccataaaatcaatccatttctctatgtattcgttttaagtatatacagaattctattcagttaacaaacatattccttatcattctatctttcaaaatgtttatgtatgcaaaataatgaataattacagttattaaatatacgctatttcttgtaatttttcaagatgaattcaaaaaaggttaagtacaattactgatttcgtacttaaccttttttaaactctaatcatatgttagttatttcattcttcgtaataatattaagaagtatggtgcaccgataattgcaatgataaccccaacaggaatatccagtggcggatgaatgccacgggctaaaccatctccaaatgttaacaatatagcaccaattaaccccgacatgataataacgtgtaatgttttatttcctattaattgtctcgcaatatgaggtgcaattaatcctaaaaagctaataccaccgacaactgaaattgcggatcctgctaatattactgctaaaattaacaatagcattttaatagttttaacttttaaaccgagtgcggttgcaacagcatcacctagattcaatacatctaattgataactcaataaaatgatgattggtatcgttattaaaaaccaaggtaatatagtataaatattcgacatatcatgtccatatagactacctgtcaaccaaacaagcgctttgtttgcttccagtggatttctgattaataagaactgcacaatcgccgtacatattgcgcctattgctaaaccaattaaggcaagctttgaacctttaacatcatattttgaaattaaaaatgataaaaataaacttactgcaaaggcacctaagaatgaacctataggtaatacaaacaatggtgctgttggaaaggtcataataataatcacagcagctaaactggcacctttagaaatacctataacatcaggtgaggctaacgggtttcttattacagcttgtataattgcacctgaaatagccaagctactaccgataataataccaagtaatgttctaggtatacgatactcatttaaaataaaatcatcttgtgtaaagattcccttaatagcatcaatcggatgaatcatgacagaccctacacataaacttatgaatatactcacaattaaaaggattgtgattaaactataacgacgtataattttcgttgtcatcatattcttttcacccctttaatcgttataaataagaagtaaagtgcacctacgaatgatgtaacaatccctactggtgattcataaggatatgtaattaaacgacttaatacatctgatagtagtaacaaatctgcacctataataaatgttaatggaatcatgactaaataattcttactcacatagcgtttgactatatgcggtacgattaagccaacaaatccaattggtcctgccactgacaccgacatacctgtaagaataatgactaatagtccaatgataattctaactttatttatattttgacccaatcccttagcaatgtcatcgcctagttccattatcgttagttgacgtccaataaaaatcgttacaattaaagcaccaataatccatggtagaatggttaaaatttcatcccacttcatactggataatgaaccgacaagccaaaacatcacttgttcgtttgaattctcattcaaaataataataccttcggtcatactactaaaaaacaaatggatggccataccagccaatgctaatttaatgggtgtcatacctttcgtagcacctgaaagtgtataaacagttaaaccacctataaatgcacctatcacacctaaatataatgcataatattctaatgctggaatgataatcgtcacaaatacaatgaaaaacgatgcaccagaactgacaccaaaaattttaggtgatgctagcggattgcgtgtcattgcttgcattaacaaaccagataccgctaatgcaccgccaataaataaccctgcaatcatccttggcatacgtacattatgcaataaaaacgttgctttcgtatctgtatgaccagtaacatagtgaatgatatcgctaaaattaattttcgaagaaccaatcgccatatttaaatatatacaaataaaaagaaagcacaaactcactatatacgtgagtgttgtgcgtctttttcttttatgatctatggcagattggctacttatttcttttatagccatttacttccaccttacttttgttctttttttgataattcaacaagttctttagccatttcttcagaagaaattaagccacgagatcttgcccaaacatcacggtcaacaatatccacgcgattatttttaactgcattcaactttttccatgttgcatcttcttgtaacttcttgaattcagcagaatcttttttagcatgatctgtcataatgatcatacgctctggatttaaatcagctaaatgttcagtgtctaattgtaagtaaggtcctttcaaatatttacttaaaccttttgttacatcgtcacttaatgcatttttaaatcctagttcgtttaaaaattgtccaacatatgaatagtttggatgtgctaataaaccagctttagcaactactgctggaagcactttttgatttctatcaaatttaatttcatctttatacttattgattaatttatcatgctcagcaagacgtttttcgccttctttttctttatttaaagctttagcaattgttttgaacgaattaatattttgtttgtagtctccatcaaaactctttaatgataatgttggtgcaattttgtttaattctttattaatacctttatgtctactgctatcagcgataattaaatccggttttaatttactaatttcttctaagtttggctgtttacgtgtacctacagaagtataatccccaattttttctctaactggtttaatgatacgttttttcttaccatcatcagcaataccaactggtttaacgtctaatgctgctaatgcatctgcaaatgagtactctaatacaacgatacgttttgcatctttaggtacttttactgtaccattttcatcttttaccgaaatagtatctttagttgatgattcttttttacttgaattatccgtattaccacaagctgcaactaaaagtaaggcaactattaatcccaatatactaaaagtttttagacctctcatcgttccactccttaatatgtataacttcatttattattttattgataacaattatcattgtcaagtagcgttcaatcttttttgtatttctaaaatgtatgactatatatttcctctaataattatgactacaattagcacatttccttagacaaaatactgataatgtatcattgctatatcatctttgcattaatacaattgacaccatttagcatgaccgttatccctgtaattcagctgatattatctgttgcaattttatgtgacgaactgttgcacttaatttgataaatcaacaaatacaaaaaatctaagttgaacaattatgatacaaccgtgcaaacgatatgtagtataacttgtcaacttagacttattgataaatatattaatagtggtttaccatagcaggagatttcacatcaaaattttgaagtagcgtatcaatctttgaatcatcaatatataccttatgtaaatttttcatatacatcgaatgagaaagtgcttcataatttaatgaaaaagatatatgatctccaacttgatagtgtccttgaccatttaaatcaagcattaaatgatcactcgaagcgcctaaaatattgatatgctgatccataggtgaaatattatcgacttttgtatctaaataaccaatatctacaatagcttgtaagaatgattcatgcgtttgtgtattaactcgaggtttaatttctaaaatctcagcctccaatgtaatcgcatcttgatataacatagcgatcgcttgatttgtcgttgtatcaacacctctaaacaacgtttcacctattcgcaattcatttattttacccaaatcattatataaaagttgtggtaacatgctcgaattaccacctgaaataattttcaatcgatatcctatttctctttcaacagctgagacgaatcgattaatcataaagatatcatcatcacttggcgcatcagatttaaaacacataaaattgaatgctaaacctacaaaatggatatttttcaagtgaataatctctttaatataatctaaaacatcataagtcagaacaccttcacggccatctttccaatctaccattaataaaatcttatgtttttttcctaaaacttctgctacttcatttatttgatgtatggtagataattctgtttggatactcatatcaactttttctatcatatctgaaatctcttttttggcaggcgtacgcaataacgtatatgttaaatcctgatctgcaatactaattatgttatccaatctggattctgcaacatgattgatacctaacgcttttaagctttctacaattgtacggtcaccagctatgcacttaattactggtgtgaattgcatatttttactttgaaaaactgtttgaagtactttggcgttatatttaatcttcgatatatttatgttaacgtgtgccatgtagtactacacctctttttttatcggattatctaactcaatatttaaatattgctttactttattttccattctcatatttaacaacgctttgacagtaattgttggtccaaacaaaatatcttttaactcatttgcatgtggtagtgttgggttaatggcatgcgctactacttgctgtactatgttaaataattcggtttcttcaacacaatcatactgattaaaatgatggattaattctgccatttgattttgaataacagcatgttggaattttgcaatcactgcatctatagaatcagctattaaactatcatttgtaattttaatatctgatacacgatgttgtaatgtttctaaatcaattctagaaccacctaaatctctcactaaaaattgaatgtcaaaatgtggccccaagttcactactgtattttgcatgtgtgcttctaaagcaattccataattttgaataaaagcaattaaaggcgggattaatgcttgagcgtatcgttcaataaatgtcgtaatactttctttagtaattccttgatttaaccactctaagtaactatccacgataactttttgatctattggatttttattaactagacttgcactaactactgttgcaccttttccatcaatttcaggcttttgtcttataatacaagcaagctgacgtgccctatctttatcaacatttgcatattcaccgaacggttccatagcaactttaaatcctggatattgattcaacatgttttgtaaagcataacttaactttggtccatctacagtagtcacagttgagactgttctaacggcacttgttgcttgtgcatcgacgggcaacttaacatggtatggtttatcaattaaagacatcgtcctaaatgataaagttgcttttgaaagtattgtaaacggcgttggaattaatatttttttagcaatccatgcttcaaaatatttccctatcgtatgatcatattgccaaggatgtactaaaatcgctctatagtcttcacttttcaaacctaaactctttaaaaacacacgaatctgattgtagtattcgggaattatttcatcaataataaattgatcattaccatccatagctgtgcacacaacatggtctttttcaatcatcataatttgcaaagggatttctttttcaaactcaggtgcatatgctcgtacttcttccatagttaagggcaatttcgttttggttaaagggtgtgttggatgcccctctggtaccaaactctcagaataagttaaatcatctgtcttatcactatcttttacatgttgtaaccatgaaaaaaagttaatatcttgtggtaaccttgaaaatttaaaactttgacttattaacgtttgtctgtgagacatttgcttatatgtttcaactaaactatctcgactgtgtattaactcttcgcgtagtcgctctgaaatagggatatcaaagtcatgattcaacacatctaataaaccttctaaagttataattaatgacgtttcacctttatttaaataagtaatatcacctgtaaactcatagcgttctaatgcactttttctaacaacttcaatagtcaacacatgcatatgatactgaatttcaattaaagatcctttttgcgaaataaatgtttgctcggggtaaatacgttctttaataatggcgttaattacacgatattgaatatttctatctgcctttgcccattcaagatataccatgattactttcctccaactttaacttcaactttctatttataaaatagaataccattgtaatgcatatagtacttattcccattattgaaaaagttctaacaatgccaaacacatctgcacatatactcattaatagacttcccaatggaatcatacctctatccatcataataatactcagtactttaccacgttcataatctttaacattattttgaaaataaacgcgatttgtcgtacgtgcccattgactaaataacccaatcaatgtaatacaaatgaacatgatgacaatattgtgaaataccacacctaacaaagcaatgccaaataaaaatgaacttaaataatacatatttaccataccaatatatttaagtactttaggtaaaactagcgttgcaataataccaccaatggcacacatcgtcatagcgataccaaatatttcagatttccccggaaatactttgtttgtcaaaactggtaaaagtgtcgtatatgaaaaacctgtcgccataatcaataatgatgttataaatatttgtcgaccttccatatgtaatttgaagtaatctataataacttttaacggcatgtatcttgatgcatcttcaggtattttagttactttaaaatgtaatggtaagcataataaaactgcgataaaataacaaattgcctgtgcaagaaatgttgttggcgcatgatagactgctaatatgacaccagcaatggcaggccctattgaacgacaaatattaatgatgaatgaatgaaatgatacagcttgtgtagtagatattttatctgataaatctggtaagattgcttgtcttaaaggtgtttcaaccgcacttaaaatccctcttaatgtcgcatatataataatgacgctaattggaattgcagtgaaactatacgtgagcacacataaaattgcagttactaaaaatgatgatgaaattgtaattctcagcaatcgccctttatcatatttatcggcaattgcccctgcccacacacttagtaataatattggtacaagtctgcaaaaattgacaatccccagataaactgcgttatgataagtggtaagtacaaaccaatttagccctatttgtccaatccaattacctagaaatagtagaaaagaactgctaaaaaaatattttgtcataaaacttacacccgcattctgttgataataagaatcattatcattaatatggattatacaaatctatcttgcttttgtaaaatatttcatagaggtgaattatgaacttgaacttaatttttaaagaacagacattaaaatttaacaaagaagaacaagaaacatatttatttttacaacaacataatagcgattgggctaatatttttaaagagatgattttacaaggaagagataaagtcactcagagattggtcacatcaatgcatcgcgaaaacttagttaaagcgcgcactcaaagtaagaaaatattgagtcgtgatttgattatgttagatatctcaacgactcatatactagaaatccagttcccacaagctaagcaaacattatatgctcctatcactggagaacacgcctttgatcgaattgatgttgaaggccctttctacattaaagatgacattacaaatacgattacacgagtacaccatccaaatgaaattcttgagtgtattttaattgaagcaccagatttaaaaaatgctgctagtgatcaatttcagcaagatttaataaacagtgcaactaatatgacatttgcaattagctatcaagcactgtcaatgcaacatgattctgcacctttatttaatattatcgaaaatagcgaagatagttacttgcgttcagagcaagccgttattgaaggtcatccgctacatcctggggctaaattacgtaaaggtttaaatgcattacaaacattcctatattcttcagaattcaatcaacctattaagttgaaaatagtactgattcacagtaaattaagccgtactatgtcactgtctaaagattatgatacaactgttcatcaactatttccggacttaattaaacaattagaaaatgaatttacgccaaagtttaactttaatgattatcacattatgattgttcatccatggcaattagatgacgtattacattctgattatcaagcagaagtagataaagaattaatcattgaagcaaaacatacgttggattattatgctggtttatctttcagaacattagttcctaaatacccagctatgtcgccacacatcaaattgtcgacaaacgttcatattacaggtgagattcgtacattatcagaacaaacgacgcacaatggtccactaatgacacgtattttaaatgatattttggagaaagatgtcatatttaagtcctatgcatcaacaattattgatgaagttgctggtattcatttttataatgagcaagacgaagcagactatcaaactgaacgaagtgaacaattaggtacattatttagaaaaaatatataccaaatgattccacaagaagtcacaccattgattccttcaagcttagttgcaacctacccatttaacaatgaatcacctatcgtgacattgattaaacgttatcaatcagctgcatcattgtctgattttgaatcatcggcgaaatcgtgggttgaaacttatagtaaagcattgcttggtctcgtaatcccactagttactaaatatggcattgcattagaggctcacttgcaaaatgctattgcaacatttcggaaagatggtctattggacacgatgtatattagagactttgaaggtttaagaattgataaagcacaactaaatgaaatgggatacagtacatctcatttccatgaaaaatcaagaattcttactgattcaaaaacgtctgtgtttaacaaagccttttattctaccgttcaaaaccatttaggcgaattaattcttacaatctctaaagcatcaaatgattcaaacttagaaagacatatgtggtatatcgttcgtgatgtactagataacatttttgatcaacttgtactttcgacacacaaatctaatcaagtaaatgagaatcgcataaatgaaattaaagataccatgttcgcgccatttatagattataagtgtgttacaacaatgcgtcttgaagatgaggcacatcattatacttatattaaagttaataaccctttgtatcgagaaaataattaaggttatagaattttattaatcgtgagctcaaggattacattaacttattaaatacaatctatacaaatgagagaataatacattttccatattcaaattattaaaaatcacaaaaaacaggctgggacataaatccctaaaaaaacagcagtaagataattttcaattagaaaatatcttactgctgttctctatttatacaatacttcgtattgaatggcttcgctttcctagggtgccgtctcagcctcggtcttcgactggcactgctccctcaggagtctcgccattaatactacgtattaacatgtaattttacttttacatacttttaaaaaataagacactttgccaaacttgcacataaatgtttaattcaataatttgaattttctgtgttgggtcccttcgtataatttaataaataccactaaactaaattaatgaagtgccttatgtataaaaattataacttgatccaacttacactaccaatagaaacttctgttagaattcctcaaattgatatttcgcgatatgttaatgaaattgttgaaacgatacctgatagcgaattcgataaattcagacatcatcgtggcgcaacatcctatcatccaaaaatgatgttaaaaatcaccttatatgcatatactcaatctgtattttctggtcgtagaatagagaaattacttcatgacagtattcgaatgatgtggttagctcaaaatcaaacaccttcttataaaactattaatcgtattagagtgaatcctaatactgatgcgttaattgaatctttatttatccagtttcatagtcaatgtttaaagcaaaatcttattgatggtacaaaagtagaagctaatgccaataggtatacatttgtgtggaagaaaagtattcaaaatcacgaatcgaaattgaacgaaaattcaaaaacattatatcgtgacttagttgaagaaaaaataataccagagataaaagaagatggagatagcgatttaacaatagaagaaatagatttaattggtagtcatttagataaagaaatcgaaggtttaaatcattctattgagaacgaagatagtactcaaattagaaaacagacccgtaaaaaagaactaagattaagaagttcaaaaataaatttgatgattattccgaaagaaaaaataaatatgaagaacaaaaatcgattcttaaagatagaaatagcttttctaaaactgatcatgatgcaacttttatgagaatgaaggaagaccatatgaaaaatggccaacttaagccaggatacaatttacaaatagcgacaaattctcaatttgttttatcctatgacctatttcaaaacccaacagatactagaactttaattccatttttaacaatgattcaaaataccttcggttatttaccggagtatattgtagctgatgcaggttatggtagtgagcaaaactatatggctattatagatgattttaataaaacgccacttattacgtatggcatgtttattaaagataaaactagaaagtttaaaagtgacattttcaacacttaaaattggaaatatgacgaacttaatgatgaatttatatgtcctaataacaaaagaataggttttaaaagatatgcataccgtaatgatagatatggttttaaacgagacttcaaactatatgaatgtgatgactgttcatcatgttctttgagacatcaatgcatgaaaccaaattcgaaatccaataagaaaatcatgaagaattataattgggaatactttaaagtccaaattaatcaaaagctttctgaaccagaaacgaaaaaaatctatagtcaaagaaaaattgatgtagagcctgtttttggatttatgaaggctattttgggtttcactcgaatgtcagttcgaggaataaataaagttaaacgagagctaggttttgtattaatggcacttaatataaggaaaatagcagctcaacgagctgtacattataaaatacatatcaaaaaagctgatttctatcaaataattaatagaaatcagcttttttacattgcctaagaatttaatgtcccaagccctttttatcgaataacttattgtaaaccttgtctttcttggttattgttttcgttatttttttcgtgtttttgtttccactctttttgagtcattacatcgtcaacttgcatgttaacttcaactacatctaaaccagtaatatatttaacttgttctttaactaattcagttactttacggaagatttttggtgctgattcaccatattctaagattacttttaagtctacagcagcttgtttttcaccaacttcaacagatacaccttgagtaacattgttgccacttgagaatgcattagtgaatgtatcagttaagccacctttcatatctaagatacctttaacttcacgtgcagcgataccagcaattttttcaacaacttcatcagagaatgttaatttgtttttgaattgaggctcctgattttgttcttgttgtttttgacgctcttctctttctttttcgttaacaccagtttgattgtcgtatgcttgttttgctttattgttatctacagtcataatagattctccttttacttgttaatttttatatttttttaattaaattctaaattgatgaattaactccatcgatttaaaaaattcataaaatcttgcttacggtctttcatatacccaatacctacaccaattaaacataaaacgatgataagtactgttttccaaaaacctaacgttaagaataatatcgcgattaatagaaacgctaggaaaccaacgattctccatttaaatacttttaaaaaattaatcacttgttgtgtagagtcttgtccgttttggttatgattgttagccatgatatacctcccttacaacactcgtggaccagaagttttctgatctctcacattaacttctaacttacgtactggcatttctgtgaaatattctacattctttttaatatccgaacgaattgcttcagttaaagattgaacttgaacattatttggtacgaaaaagtcagttttaatgtcgatataagatttattttttttgttatatagtttcgcaactacatttggttgtcttacttgatcatattttgcaaccgtatcgaatgccgtcttttcaacagctttacgagatacgtaaacatgaccatcatcgaagtctttgtataatccaggttttcgatgcgtaggtttgaagatactaaatactaatataagacctattaatatcaatagtgcagcaagtgaaataagtaatggttggaaccattcaaattgaaggaagtagtcttgatattcagttatacgtccatcttggatatacatgaataacaggaaccccacgattactactattaataagccaaggataaagtttttaagtcgtttcacccctaacgacacctccttagttaaagttaatttaaaaacatattaaatatgtacccatcagtttttttcttaaacataataaattaataactttaaatttatttttaatatataagatgaagtaccatttagtaatatattccctagtttttgtaaataaaacctcattattaattaattttcgtcaatatgttttgaagaacgatattctaaaatatctgggtcacgatgtttaattaaaaccttattactatttctcggtttctcctcactcaaagattttataagcgaccatatcatcgctataatgaccacggaaaatggtaacgcagcaatgattaataaattttgaattgcttgagtaccacctgtgtaaatcatgatgattgcaaataatgccataatgataccccaactcactttgacaaatgacttcggattaatatcaccacttgaactcaacatacctaaaacataagttgccgaatccgctgatgtaacaaagaaaatcataataacaagtaaagtaattaagcttaatacaaaacctagcggataatgttgtagcgtcgcaaaagttgctgtttctgtcgcagctttagcaatatcggcaatatgattatcttgtaagtaaattgctgacgcgccgaataccgcaaagaatataaagcaaactaacgccgggacaaaaagtacacctagaataaattctttaatcgtacgtccttttgacacacgtgcaataaatatacctacaaatggtgcccaagatatccaccatgcccagtaaaagattgtccaattttgtaaccattggaatttttgaccacctgtcggaatgcgtaaactcatactaaagaaatttgcaatataattacctagaccattcgtaaatgtatttaaaatgtatagcgttggcccaacaataaaaagaccaataagtactacaaaagcaagtaacatgttgatattactcaacgttttgatacctttatcgatacctgaccatgctgaccaagtaaataatatggttgcaatgacaatcaagattacttgcatcgtgaagttactcggtacattaaataaaaaatgtaaaccttcgtttatttgcaatgcaccgaaacctaatgttgcagcaacgcctgttactgtagctatgactgccaatacatcaatggcaccacctaaaggtccacgcattgccttttcacctaataaaggcgtcaatgtagcgctgactaagccaggatatcctttatgaaagctaaaatatgcaaacactagcgcgacaataccatagactgcccatgcatgaatcccccaatggaaaaatgaaaactgcattgcatcattaattgcagattgcgtgccagctttatgaataggcgttaatttgaaggcatgactgattggttctgccgttgtccagaacacaagtcctattcccataccagcactaaataacatagcaaaccaagacggcaatgagaattcaggatcttcgccttcttcacctaatgtaatgtttgcgtatctcgaaaataaaatatacacacagacaaataaaataactaaaacgagcaataaataataccaagaaaaatgtagcgcaataaatgtagtaatgttttgcgtgagtttttctaactgtttcggaaatattgctccaaaagcaacaaatatcgtacatatcactaaagatacccaaaacactagacttactgatttatttttcataaatacaaaccctttctgtgtaatggtaagttcatacccataactgcaacattttaatcatttgtaattttatatagacacaattaataatgcctcatcttttaaaaatgatatataaaacacactcaaattatttatcattgagcaacaaagtattttattgtatttaagtaatgcctttctagtgcattattgatttgatacctgcaaagttgccatatttccgtttagaatcaatagtcgctagacacaaaaaataagtcgcctatacagtattttctgcataaggcgactttacttactaatctatatattaattactaattttccaatcattgattgtttttccaacaattgatgtgcttgatataagttttcaggtgataaaccttcaaaaacttgtgtcgttgttggttggtaatgccctgattctatatttttcgtaatatcttctaaatactcatgttgtttaatcatatcaggcgttcgatgaattggacgcgcaaacataaattcatgtgtaaatgttatactttttaattttaatgcatttaaatcttgatcttcattaaaagctacgatagtcgtaatatgccctaatggttttatcagttcaatcatagtattgtaatacaagtctgtattataggtgcaaaatatataatctactaatggaatttctttaaattgacgcactaaatcctctttatgattcaatacgatatctgcgcccatcttttcacaccactctgttgtttcttgtcgtgatgctgttgtaatgacagttaaaccataccgtttagcaatttgagtggctatactgcctacaccaccggcaccattaatgattaagacagacttcccttcgttttcagcaggattcgtagaaattttaaatgtatcaaaaaacgtttcatatgccgtaataccagttagcggtagactaaccgcttcattagcacttatgttgtgtggtgcttttgcaactatagcttctgacaccaattgatatgtcgcatttgatccttgtctatttggcgatccagcataaaatacaacgtcacccggactaaataatgtaacgtctggtccgatagcttcaacagtaccaatagcatcaaacccaagtacacgaggtgcttgagtgacttccatttgtcgttgctttgtatctacaggatttacactaatgctatttactttgactaagatatcatcgttttctggcgttggctttctttgttcgtatactttaaataaatttccttcttccaatttaaagggcttctcaaatcctatcattttcatatcgtttcacctcatttatgaacttatttcttattatacaaaatagaagccatgtgtgcttatatcgcagcatcatgactcctttttcatttgaatatataaataattacagacgactttcgtattaaattttagacttatttctaccatgttgctgaacaaatttactttagataaaaaattattaaattttggtcaattaacaaagttagtttgttaaaacgtatactttattattccgttactttaataacttgtttaccaaagttatcgccagtaaataaatttttaaatgcatgtggcgcattttcaaaaccatcttcaatggttacttgtgactgaattttaccttcttgaacccatgttgcaagctgttcactagcttctttaaaagcattagcgaattcacttaccaagaagcctctcatcattacttgcttcttaataagcgtaccttgaatacgtggtccgatatcggcttcaggatgattatatgacgaaattgcgccacatactggtacacgtgcaaaacgatttaaatgcttaaatacttcatcgccaactgttccaccaacattttcaaaataaacatcaataccatctggtactgcttgtgctaacgcttctgcaaaatcctctttcttataatcaataccagcgtcaaagcccagtgtctctgttaaataatttacttttttgtcgccacccgcaatacctactacacggcaacctttaatcttagcaatttgacctacaactgaacctacagcaccagatgcagctgaaaccacaacagtatcaccggctttaggttgtccaatatcaagcagaccatgatatgctgtttgtcctggcattcctaaaacacttaaatataaatcaagtggtacatctgtcgttggaactttagtaatttgatccgcttggacatgattaatgattcgccaaggcaacatacctacaacgacatctccttttttataatctgcgagtgtcgaatcaattacttttgcaacgacatggctaacaatcggtttaccaatttcaaaaggctgtacatacgaatctgccttagtcatacgtcctctcatatatggatccactgaaatatacagcgtttgtacaagtacaccatcgctctcaagtttaggcgtgtcaatctcttcaattttgaatgtatcctcttgaggcatgccttctggtattttgttaaaaagaatttgtttattttgcatcattaatcacctttctttatttgaaacttttacttatttgttacttaagcgttaagtttgaattgtgtcttcgtgatgtctgtatgcaaatacattcttagttgttatattttgacttaagcactgattcattcatgtaacttcaaccacattatatttgctataatcataaatttaaaatgttacgacttagacattttatggaaactctcaaacaatagataatttttgaaaagctctaatattacaagcttttttgccccagaaaaactagcagttgctttattttttccataagaagtcgattaactcattagcaacattttcattctcatgaagctgactatgttgtgcaggctcaccttcatatttagattctcgataacttttcggactatttcccagtaaatattttaatgatttcgaagaactattagacactctgccgtctgaatgtgtaccatctttcaaatccccataaatatttagcacttcgatacctttacctttataaatatcttttagcacgcgtaattgctgataaggttgattcattcgacttggtttaccatctttatcaactgtaatttcattgacatcttcattcatatttaaaacaccattaaatgtccctgcaatattcacttgtttgtttaactgtggcagtgacttgtcgttaccatatgtcatcatatattgtgcaaatgttaagttccccattgagtgaccgacaaagttgaatttatcgaaattgtattcagattgtaacttagtcagtacatttttaaaccacgcagcattcttatccaaatagccttgtctgttattttcaagttcaattttcacaataggattcactgcatcttttcttagtttccctttaaatgtcactgcaccatcctttgaaacgtaagcagtgatgatatctttagttacccctcttttttctgcttgcttcaccataaacttttcagaattggcactaccaccaaatccatgtaagaacaatgttggaattggctttttaacaaattgctgttgttgtattttaaatgtttgtgcctgtcgttgactaaacaccaccataataatagagcctataataatagcgaccgctaacaatgtcgtaataattacaaaaattttcttcacacttttaactcccattcatgtcttttatataagtataaaggatgtgattaaaaatgtcctttagttgattttgaatacatcattaacttttaagatgactttggaaagttgtccgttaacgtttgttaattgattgcttctttagctttcaatggtgtgtcacccattgattaatatataaatatgtatatgcatgtttaatttatctctttctataaataaagacctaccagcactcgactgataggccttttaatatctataattatttaatttcttttgtttcggctaactctttgtaccaataagcacttttcttaggataacgttcttgagtctcaaaatcgacatagaataaaccatatcgtttttcataaccatttgaccaagagaacacatccattaatgaccaaataaagtaacctttaacatttgcaccatctataatagcatctgcaataacgttcaaatgttgtcttacataatcaatacgtgcatcatcatgaactgttttttcagattcaataaattcatctttatatcctaaaccattttcagtgatataaatcttatgatagttaggataatctttaacaacacgcatgatttgatcatataaaccttgaggatagatcatccagtcccagtctgtgcgaggtacgtcgacatcaaattcacgttgtccgacacctttaagttggtatttagaaccgcctttatcacctgtcgcattatgcgtgatttcagattctccatcgtaacctctcatccaatcactcatgtagtaattgatacctaagaagtcgtttaaatctttggctgcatctaaaatggcataatcttcatctgtaatgtttaatttaccgccattaacagataagatatgttgcacaccttccatcgtttcacgagaatacttacctaaatatgttgcatctaagatgaatttattatggatgatatcttctaattctgctgcacgaacatcttcaggatttgatggatcgaacggatattttgttggcaatgcgtgtacaacaccaatttctcctttgtatccgccatctttaaataattttactgctctagcatgagccaccatcatgttatgatgtgattggaatactttttcaaaatcatatttaatacctggagggaatttacctactaaatattgaccatcaccaataggtccaatttcattgaatgtagtccaatattttacttctgggaattctttaaaacaatattcagcataatctacaaagtagtcaatcgttttacgatttagaaaatcgccatctttgtgtaacacttctggtgtatcaaaatgatgcaatgttacaaatggttcaacatgacgtttatgacactctgcaaataacttatggtaatactcaacacctttagggttaacttcgccatatccatttgggaagatacgagaccatgcaattgaaattcggataccattaacaccgaatttttcacttaattctaaatccactggatatctgttataaaaatcactcgctggttctgcagtgtaccaatagttttcttctaaatacgtatcccatgctacgcgacctttaccatccgtatttgtcgcaccttctgcttgatatgctgctgttgctccaccaaaaataaaatcttcaggtaatgttttagtcatatgaaaaactcctattcttaattttcaaattgttgttgaacgaaatcaagggctgcttggccatctcgtgtcaatttgatatattcagcaccttgagtcttcgctaatttaatacctaatctatctgtatcttgcttaatatcttcatagttagacgcaacttgtggcgctaaaatgattaattggtactctttcataatgtccatatgtgcgccatatccgccagctgccgctttcactggcacatgatattcttcagctgctttattaagtgcattggctaataatccacttgtaccaccaccggcacaaagtactaagacatttgtttgttctgtgatatttgaagctttagctgcatcgtctgatacaccacttgccgctaaaattgaatcagcttttttcgtatcaaagtttgctgcaactttttcttttaaatctgaattactttctttacgtccttcttcttcatcaagaatttcactatcataaacttttaggaatgggtagtaaataataatatctacaacaatcaaagtaatagctagtacgaatgaccataaaccaaaacctgtacccatgataatgcccaatggacctggtgttgtccaaggtaaattcacactaaaactattcattcctaacacttcaacgaaaagtttgaaaatccatacgttaacaattggtgctaatacaaatggaataaagaacacaggattcaatactagtggtgcaccaaataaaattggttcgtttacaccaaagaatgttggtacaactgatgcacgtccaatcgctttgtttcgtttagatttcgtcatccacataaacatgaacgggacgaccaatgttgcacccgtacctccaaatgtaacgataaacatttgtgtacctgatgtaataattttatctgcgtgttctccagcttgaagcaacttgaagttcgcttcgatattcgcatatgtaatggctgcaattgctggctctacaattgacggaccatgaatacctacaaaccagaataatgcaaaggcaccaaagataattgtgacaccaatccatccatctgctgctgtaaataatggttcgaataattttaaaataccttccgctacatttgatttaaagctgttgcgaatgactaaatctaatgcataaagaatgatgattaccgctgaaaatggaattaagtccttaaatacttgtgaaatattcggcggtacttctttcggcattttaattgtaatattgcgcttcacacagaagttataaacaataacagttacaaatgctgataagaatgctgttaataaacctttagttcccataaatgcacttaagaatccaccatctttggctggatcagaagctaagaacaagaatccacacatcgctgctagcattgtagaaataaagttaatttgatttgtactttctagcttacggttaaatgaatctgttaaagatttcgctgtcgttcctgctactaaaaatgctacaagccccatcgtatagttgtatggtttcattaaaatggcttccatgcctttatcccatttaaaaccaaatatatttggcacatatgcaattaatagaaagatacttgagaataagatgacaggcattgcagaaataaatccatcacggatggctcttaaatatatgttacgtgataatttctcgaaaaatggcttccctttttcaatttgtgcgatcaatttttgcatcattgtcatcaccctcttttataaaattctaataaatgcttcattaaatctttcagtaaaattgttgtcattaaatgatcttgaccatgcatcatcgttacactgtatgcaatatcatcaccttgcgcttctttagccaacaggcttgtttgtgctctatgcgcttccgcaatgcaattgtttccttcttcaatcagtgcatctgcttttgcaaaatctccagcttgagctgctgttaatgcttctaaaaacttagaacgtgcatcccctgcaaatgcaacaatttcaaaacctaataattggacttcttctctattcatagcattaatccccttttaaacttattttctttgtttccaagatgtcgcagtatcttttaatactttatttaagtcatcaatatttttgaaaccagttgtacgtaaccattcacgagcagcatcttcaccttgttcaatgtatacttgaacagcaccagaccatgtagcacggccacaaagtaccccgttgaatttagcaccagcttcgtgagcaaattttaaagtttcttggaataattccgcagaaacaccagcacttaagtaaatgtatggtaaatgagttgctgcatcttgatctttaaagtgttgtgccgcttcctcttttgtataaaccacttcaccttcagcaaagccttctacatatttcatgtttactggtacttcaactttcaatacatcaacgttaaagcgtggttctgagaataatttcattgcttcgttaacctttctaggcttaacttttgcgaattcaacactaccgttatcaggaatgttgtcatcgtatgttaatacttctaaaaagaatggaatatcttctgcaacacattctgaaccgattctttcaatgtatgctttcttttgaatgttaatttcttcagcatcatcaacatcatagtaaagtaagaatttaacagcatttgcgccttgttcttttaaacgttttgcagaccactctactaaacagtcaggtaaacgacctttagcgtttacgtcatatccagttttttcataagcaagtaataatccacaatctttgttacgtgcatctgaagctggtaaaccatattcaggatctaataaaattgaagatgcatattgtgttaattcttccgcaactaatacttttaattgttcaatttgagctacagttggttcttcagtttgatgttttgccatcatgcgttttaaagcaccacgttggtcaaatgctaatgcagaaatgataccttcgttgttacttaattgttcaattgatgcgattttttgattcgattttgacattttttacacctctaaaacttcaatttgattgaataaatcatcataattatttaaattgacataacctgtttgtgcttcttgtgcattcagcatgcctaaagtattggctttttttagtaaatcgtggtcgttttcatgattaagaattgctgaagtaattccagcaactgtagaatcacctgaaccaaccggatttaatacacttattgtcggaatattcactctatagaatgtatgattgtgcttagcgaatgcaccttgtgcacctaaagacacaataatccactcaatcccttcgaataagggttgtgacactgcctgtttcaaactttctaaactttcatcaagtggctggttaagcaattgatatagttcagaaatgtttggtttaatgactgtaggtttgtatggattttccaaaactgtttgcaaagttgcacccgagcaatctaatatcacaggcacacctttgttttggcatcgttcaatgatttgtgcataataatcttgatttaatcctttaggtaagctacctgaaatagcaactgcttcaactttttctaataattgttcaaaatgtttaataaatcctgcagcctcttgattatcaatctccggtccctgctctaaaatttctgtttgttgcccttcatgtaaaattgcaatgcagtttcgtgtttcacccttaatgttataaaatgcatgcttgatgtcggcatgatctaattttttagcaataaattgacctaattcaccgccaataaaaccactcgcaaggactggctcacctacttgcgcaagtactcttgttacatttaaacctttaccaccagctgttttacttacttcttgaacacgattaacatcatctaatttcaatgctgttaatgggtatgaaatatcaacggatggatttaatgttaaagttaaaatcatatgtgtcgtcccttaatcgtggtattcgcctctgtcccatttttctaagaattcatcaaagaaatgtggatcagcttgatctgcattgcttgtttctaaatgtttaattttagcgattaattttttgttctcttcagttggtttatattcagcattaataaatgcatcgataatatcgcacattaataactcacctataatacgtccaccgaagccaataacgttcgcatttaattcttctttagcgtataacgctgatgtcatatcacgtactagtgctgaacgaacgccaggtactttatttacagcattgttaataccaacacctgttccacaaatacaaacacctaagtctgcattaccgctaacaacttgttcgccaacttttttaccaaaaattggataatgtgttcttgtgaaatcgtatgttcctacgtcaatgacttcatgtccttttgattttaaaaattcagatacacgcatttttgtatctgtaacaatatggtcgcatcctaatgcaatcttcatagtaatttttcctccttagcacattttattaagcatatctacgcggatttggtgtctaccaccatcgtatttaccttcaacaaaacctttaacgacatttttcgctaatgtgtctccaacaatttcagatcccatagtgatcattcttgaattgttatggcctctagtcatatatccagagcgttcatctgatacttcagcagcaatcatgcctttgatttttgtagcaaccataaagctacctgcaccaaatgcatcgataacaatacctaagttaccttcttgactttgaacatcttttgctacagccaaagttgcatcaacaaagtcaacttcctgtccttctgttacgtcaacaacatcatatttattgtctaataagtatgatttgatgacttcttttaatcgtttgccagcttcatctgaaccaataataatcgccataataagactcctttttactttaattttgaaatacctttcttaaaatgtgacatatttatttgtaggttatgaaaatcttgagaaaaggctttcaatttgattacgtttaaattataaacataaacaaacaataaatcaacataatatgtttataatatgtttgtttatgacgtattttcaaacaataagtgaacattcatattgtggtgttgttttaattaggtattcgtctgaaattgtagtaaaactttgtcgaggttcccgttgacataaatttgcataaaaaatagcccataaatgaatgcaaattcacattcacttatgagcatatagatacatattttaacaatgcagttatacttttaatttagtcgactacttcaatatatgttttaatcgtttctactttttcttcatcttcatagtccatgaccactgcagtcaattcgtttaactgacaaaatgatgtaaaatcttctttgccaactttcgtatgatcgattaacaagtatttttcaattgaattacttagtgccagttgttgcgtataggcttcatctaatgtagatgtcatcacagcacctttatttactgcgttactactaaagaacatcttgctaaatcttagtttttccaacatggcgttcgccatttcacctacaaatgcttctgtaatatggcgcatttcaccaccaattaaatagacacgaaaatgtgctgtttgtttttctaacaaaattttatacaccggcaaacaattcgtaataattgtgagcgtatgatgattgacttcttctgctaatagttccactgttgttcctggtccgaaaaacaaagtatccccatcttcaattaatgatgcagcttttttagctataaatcgtttttctgcaatttgacgggtatgtttttctttatgcgatatttctttatactgaaatgttgaattactgcgtgcaccaccatgaatcttcgttaaaatccctttattttccaattcaattaaatctcttcgaactgtcatatcagacacatttaaaccttcgacgatttcattcgttcttatcgtgccctttttattcactagtttagcaatttcgtccaaacgttcatgtttattcaatgtaaaattgcctcctttatttaggcgatgggtcattatcctttatgtttagacatcaattttaatatacatgcttattctataataaaaattgcgtaaaaactaatataatttaactgttcgattatatgtataattcatttttaaaaagaactgtttaaactgcgcttttgataatcgtaaaatgaatatactataataaaagtaaaagacgttataaatcattcattattttgatggggtgtttaacttgaaacatgatttagagacactaaaacatattatagatagttcgaatcgtattacattttttacaggtgctggtgtatctgtcgcaagtggcgttccagatttccgttcaatgggtggcttatttgatgaaatttcaaaagatgggctttcgccagaatacttgttaagccgtgattatttagaagatgatcctgaaggttttatcaatttctgccataagcgcttactatttgtcgatacgatgcccaatatcgttcatgattggattgcaaaattagaacgtaatcaacaatctttaggtgtcatcacgcaaaatatcgatggtttgcactcagacgctggaagtcaacatgttgatgaattacatggcacgttaaatcgtttttattgtaatgtatgtcataaatcttatacgaagtcagatgttattgatagaactttgaaacattgtgataattgtggtggtgccattcgaccggacatcgtattatacggtgaaatgttagatcaacctaccatcataagggcattaaataaaattgaacatgctgacacccttgttgtactaggttcatcactcgttgtacaacctgccgcaggattaatatcacattttaaaggcgacaatttaattattatcaataaagatcgaacaccttatgatagcgacgctactttggtcatacatgacgacatggtttccgttgtaaaatcattaatgacagagtaatcagtatgtaaaaagcatttcccgaatggtagggaaatgcttttaattttggagttgcgtttttggaatttggagtttggttttcggaattcgacatttggaattcagaattataatgagtggaaaattttaattattgcgtgtttaatgacttggttttgtagcgatttttatttgatgaattgtttttttgtttgatgttgggatgctacttttaatggtttgtcatttgtaagattaaaaataaacataaaataagtagaaaaataaaagctacgaatattaaaaaattagatatcttcattatcaaattccgatattaaatcattatatttttcagaatatcttgcataatcttcattattattaaaagctagccatagacctctatcatcatataaatgatatattaagtttttagtattgttaattatatatatttcagaataattatcattctgattgatatttggaactaaccctttaaagtcttgattggatatagcttttaataattttttatattttatatcttttatggaacacttatatgaaaactcctcgcacaaaatattatcatccttctcctttttatattctttaaagtaatacaattcatctattgttaacgatgtaaatttttttataacatttgttttcttataaggttcactataaacatatactacatgaaccaaatttatagaatcagaaggcgaaaacaaatcttcaaaaatgtttattgcattatcatatacagctaaaaataagtattattgatagttttaccgtcctccaaaaactggtatttatcgccacttaaacttaaatgaattgcgttttttacctttctaaaattcaacttttttatatccaaattatttatatcaaagcacataatttacaacaccttattcccttaagatttttccttctttagttaaagaagctattctttttcctttgttatttattaacttccaataagaaccaccatgtgattgccctttatttttggaaatagtccatttagtttttgaatctctccaggtaggatttttcccttaaaccttttgagtaaattcaccaatactcatccccttatcatttaacaaacttttattaatgtttttggttatattatgagtctttactgcttttagattgtaaaaattatcgtcataaatagtggcattttccgagattcaaatggtacaaagtacattgtaatatgcataatgatacctgtaattaatgtaataatagaaaagtgtatatatctcatatcgccacctgctatacaacttattaaataattaattccaagacatattaattatctaattataaccttagttacgttattacataatataaaaatatataataacttatttgcttgctcctttcactttttaagagtaaaaaataacctgaaacatagactttaacatccaagtttcaggttagtgtaatgtaaatgatttactttgttatattatgattaaacatctaattctctgcttgtaagtgctttaatcatctctggatcagcatgtgagaaaaattggctattactttcttctaatgtcgcaatttgttgtttatcttcttctgtaagttcaaaatcaaatatatctaagttttgagccatacgttctggattcactgattttgcgagtacaacaatgtcacgttctactaaccagcgtaaaataacttgtgcaattgatttgttgtatttatctgcaatggcctgcaacaattgattttggaataattgatttttaccttctgcaaatggtgcccaagcttctaccacaacattttcttgttgaagtgctgcaacttgttcttcttgttgatggaatggattaatttctatttggttcacttgtggttgaatttgattgtgaatacctaaatctacaattcgatcaacgccgaagttagatacaccgattgctttaattttaccattttcttttaactcttctaatgcacgccatgagccatatacgtcattgtaaggttggtgaataagcactagatcaagatagtccaaatttaatcgttgtaatgatcgttcgattgatttgatagtatcttcatagttaacattttcaatccatactttagtcgtaatgaatagttcacttctatcaatacctgaagcttcaataccttgacctacttcagtttcatttaaataactttgtgctgtatcaatatgtctataacccgctttaattgcttctttaaccgcttctgctgtttgttcttgaggaatttgaaatactccgaaacctaatactggtatctttacatctttacttatttcaatatgattcataaaatgaacctcctttatcttgtatgtccactataaaccatggagcgaactctatagcaagccataggtttactttctctcccaaagacgttcaacattgtcatcataattatcactagcattgattttagcaatatgattatcataattatcaattttatattgtagtaaatctctcacatcatgaattgtctttaagttttcatttaattcttcgagttgcttatttaaaatttgcttttgctgtgcttgaatattttcatttttaggaagctgcgctaacctgcaaaattcgataagcgattcaatactgacgcctgcatttcgcaaatttttcactaaataaatccaatttaaatcactatcattatatattctatatccattttcatctcgattaactggtggaatcacaccaaccttttcataatatcttaaagtgtcttgagatatattcatgagcgctacgacttctttagttttcattgcgactatcctttcagttatgtttggtcgtctaaagtaatgttgctttatatattgtcatcttcgtttgaatacttcttattttattactcaaatttaaatttgtctcttttttaacattttacatttcatcgtttttaattactttaaaaattgtataacttaaatatttaaaatgatataatcactaagattgataatatttaattttttgaaaattattttagttgcaatttttgggtgatgcggaaaatttgggtgatcgattgtttatatgcatcaacattctttgtggattgtttgacagtagacagtcatttgtatacgttaacgaattttgaaaaattgaatcattatttaatcataatattcattgcgcacgcgcaacacaaaaaggagacatgtcaatgacatatagaataaagaaatggcaaaaattatccaccattacgttattaatggctggtgtgattactttgaatggtggtgaattcagaagtgttgataaacatcaaatcgctgtggctgatacgaatgttcaaacgccagattatgaaaaattgaggaacacatggctggacgttaactatggttatgataagtatgatgagaataatccagatatgaagaagaagtttgatgctacagagaaagaggcgacgaatttactcaaggaaatgaaaactgaaagtggtaggaaatacttgtggtcaggagcggaaacccttgaaactaattcttctcatatgactcgtacctatcgtaatattgagaaaatcgcagaagcgatgaggaatcctaaaaccactttaaatactgacgaaaataagaagaaagtgaaagatgcccttgagtggctgcataaaaatgcatatggaaaagaaccagataaaaaagtaaaagaattaagtgagaattttactaaaacaactggcaagaataccaacttaaattggtgggattatgaaattggaacacctaaatcattaacaaatacgcttatattgctgaatgatcaattttcaaatgaagaaaagaaaaaattcactgcccctattaaaactttcgccccagatagtgacaaaatattatcttctgtaggaaaagctgaacttgctaaaggcggaaatctagtagacatttctaaggtgaaacttttagaatgtattatcgaagaagataaagatatgatgaaaaagtctatagattcatttaataaagtcttcacttacgttcaagattctgccactggtaaagaacgtaatggattttataaagatggctcttacattgatcatcaagacgttccatacactggtgcttatggcgttgtactcttagaggggatttctcaaatgatgccgatgataaaagaaacaccttttaatgataaaacccaaaatgatacaaccttaaagtcatggattgacgacggatttatgccactcatttataaaggtgaaatgatggatttatcacgaggtagagctatcagtcgtgaaaatgaaaccagtcactcagcatctgcaacagtaatgaaatcattgttgagattaagtgatgccatggatgattcaacaaaagctaagtataaaaagattgtcaaatcttcagtagagtcagattcaagttataaacaaaatgattatttaaattcatattcggacatagataaaatgaagtctttaatgacagataacagtatttctaaaaacggattaacacaacaacttaaaatatataatgacatggatcgtgtcacctatcataacaaagacttagactttgcatttggtttaagtatgacgtcgaaaaacgtagcacgctatgaaagtatcaacggagagaatttaaaaggttggcacactggtgctggaatgtcttatttatataacagcgatgtcaaacactatcatgataacttctgggtgacagccgatatgaaacgtttatcaggtacaacaactttagacaatgaaatattaaaagatacggatgataaaaagtcgagtaaaacttttgttggcggaacaaaagttgatgaccaacatgctagtatcggaatggattttgaaaatcaggacaaaactttaactgccaaaaaatcatatttcatattaaacgataaaattgtcttcttaggaactggcattaaaagtactgattcatcaaagaatccagttacaacgattgaaaatcgcaaagcgaatgggtatacgttatatacagacgataaacaaacaaccaattctgataatcaggaaaacaattcagtctttttagagtccacagataccaaaaagaacatcggttatcattttttaaacaaaccgaaaataactgtaaaaaaagaaagtcatactggtaagtggaaagaaataaataaaagtcaaaaggatacacaaaaaactgatgagtattatgaagtaactcaaaagcattctaattctgacaataaatatggatatgtgttgtatccaggcttatctaaagatgtctttaagacaaaaaaagatgaagtaactgtcgttaagcaagaagatgacttccacgttgtgaaagataatgaatcggtttgggctggtgttaattatagtaatagcactcaaacttttgacattaacaacactaaagtcgaagttaaagccaaaggtatgtttatacttaaaaagaaagatgataacacttatgaatgtagcttctataatcctgaatctacaaattccgcttcagatattgaatctaaaatttcaatgaccggttactctattacaaacaaaaatacgtcgacttctaatgaatccggcgtgcactttgaattaactaaataagcaagaaaatctcgacactataccatttttatagtgtcgagattttataagtatcgccatcattcagcttgtaatccgcagaccacatcccctttgataagttctcgattatttataaatcgaatttttaaagatgtacatgcttcaatattcttatcattcattacttgaaaatgtatatgaggttcagtagaattgccagaattcccaaccttcccaatgatatcaccatatttaacattttgcccctcattcacaatgattgaatattggtgtaaatgagctattaagctatactcattttctgcgtgcttaattacaatataatttcctaaaaactgtgattcattcgtacttccaatactgttgtcttgaaccccattcactactttttcaactgtaccatttgctggcgcaatgatatcttttccaaaacaaaaataatcagtatttacttttccttgattcttatatgttttatgattttctttaataactaaatcaatagcatacctttgatgtgggtataaatagtgataattatataattcattatctccaccccaaaaaatctcatagcaatctgttgtcggcactgcgtattttaaagtcgtttcattcttaatcgcatcataattaattaacggacgcataacaaatccgataatactattatctttccaagtcactgacactccaaattgatttgcttcatctatccatatttgctcaatagtaccatcattttgagtacacacttttaattcatgtacatcagactgccttgtataagatttgaaaagtttcctaaactgccaataactaaactctcgcttcaaattttgatcaaaaatcttatatattttcctgctcttacttttatttaaataagccccaaagtttgttttattcatatatacttaacctattatattaattttggtatcaattctttctccagttcctgcgtcatttttgcgctacctgaatcgtctacacttaattggataaatcaacatataaataattttttaaagctaaagtgtagtcgattcaccatattttctaatcatcccttaaatattaatatttgcacttaaaaagtatacatatcactcaactaatcaataatcatacttaccttcaacaaattctttaacatgcagtgttatcccttgataatatggatattttgttaatctaaatttctgctttaatgcttcatctctactattcgacatcaaatatgcatgttcaagatagcttaaatatgcttcgtcattgccgctatctccaaaacctaatattgattttactggtatattatatttcctcatcagaaattgagtagcatataattttccagcatttgacggtgtgaagtcaatatcatacgcattttcaggatcaccagctaatggattgcttcgactaaatctcgctgtatagttttggtcatttgcgtatctgacaagtgcttctaggatacgactatcattgttgtgattacctgttgaatgaaaataaaaattataatgtgtttcattaccttcaaatgctctttgtggaataaattcgacattatattgcgcagaaatatgacgtaatatatcttcaatatcttcaaataaaaatggttcgctcaagactttctttttatatgtttctgattcaacatattcgccattattccaagtgaacattttagaactcaaatcagaaaagatatgtaatggtttaaacgtcatattaacttgatccattttatccatgacactttgaaatgtacttcctgtcaatacagcagtgatcacttcattattattagttagtttttccaacaatttttccatttctcttaaatgacttaaatcttcttcatttgtattatgtttaaaatatgtttcatcaaaatcaaacaataatagacgctttgacatactcattcccccataatattttaatgaatttatctataacttaaatacactataagtctcaattaaaagtataagatcgactatatgcttttcatgattattatatacaactaatcaatccctataaactaaaaacattgcttaccacttttcaaaatgcacgagtcatatccctcgttaaaaactattactaaaaattaaaatataaaaaatgcaaaaagtatgttttaaactttatgaaacgtgttatacaaatagtgtaatatcatacaacccgaaaaggagattgagatatgaaactaaaatcatttgttactgccactttagcattgggattattatcaacggtcggagctgcattaccgagtcacgaagcatctgcagatagtaataacggctataaagaaatgactgtggatggttatcacactgttccttacacaatttcagtagatggtattactgcattacatcgaacttactttatcttcccagaaaataaaaatgttctttatcaagaaattgacagtaaagtaaaaaatgaattagcttctcaacgtggtgttacaacagaaaaaattaataatgcccaaacagcaacttatacgcttactttgaatgatggtaataaaaaagtagtgaatctaaagaaaaatgacgacgctaaaaattcaattgatccaagtacaatcaaacagatacaaattgtagttaaataataatttgaaaatagttttatagggcaagcgctgaaaaattggcgtttgtctttttagttattgaacttgtaaattattgttgtttgcttctcgtagtaacagattggcctatacaatagtaaattttatatgagtgtgtaccacaatttataatctaaacataacagcaaatctcaaatatctggaacctaataaatcccctcactactgctaatagtgaagggatttattttattacttagacgtaattataaatatatttgttctattgtagtcatggttaatcatatttacaaactatcatttctaaatcgcgcattatgaagtcaattttcataaaccgtcattatatttctggattcattattcagcttctctaatttcgtctgcaatatctttatagtcaatatttgctttagtgaaatctttatcttgaattggaaaatgctgttcaaatgtttctatattttggatttctactttaacatcttctacttcaaaatctaagacatgtccaccaaagttacgatcatcattcgcaaagtgtacatgaaatcctgctgatccgataccatggaataattctggtgtaaagaaaccaacgactgaacctttgacatacgtttcagtttgttcaggttgtcttctagctgaatcgattaaacgtgtataaggtggttcttgagccggcatcatacgtacatgcatttttttaaataagcctgaaatttttactgctgaaaataaattttcactcaacatcttttccttaatttctgcaaaaactgcttctgaagatttatctttcgtttcatagcttgtatctgctacaaatttagttacagttgcatatggtgttaactcgtcaccttttaattctacaaattctttatgttcatttgcatggtaagcttttccatctaaaaagattacctcaccgtttgaacctgttagtgtagcgatacctaagtcaccatgttgcaataattcatttattgatgcagttccttttaataatcctgccattaatgtgcctaatgtaccatgttggtataaaacattagtcataaaatctcccactcctctttaacatttatctttattttagttaaatacgtcaggtaacatatttgttgaaagtttgatattatctttgtaatttacaggtatatcaattaatactggaccatctgtttcatagccctctttaattgccgcttctaattcttcttgattagtaactcgtaaacctttcgcgccaaatgattctgcatattttacaaaatctacaggaccgaagtctacacctgacgaacgtttatatttcatttcttcttggaattcaaccatgttatattttccatcattccaaataagctggatgatatttaaatttttacgtacggccgtttctaaatcttgtgatgaaaataaaaagccaccatcgccagcaacggacacaacttgcgtattagggcgcacaagtgcagctgaaattgcccacggtaatgctacaccaagcgtttgcataccattgctaaataataaatgtcttggattgtaacttctgaaattacgtgccatccaaatatagtgacttccaacatcaactgttacagtagtatcatcagttaataccttttgcatagattcaataatttccactggatgtagaattccttcttcatgcgtcgctttaataccagtttcttcatcaatatgtgttcttaattgttctaattcgtctaaatgttgttgatttataaatggctcatccactttttcagaaatcatttcaatcgttttagcaatattaccaatcaactcttttttcggttgcatataattagtaatttcagcttgaacttcgtcaatattgataatttgtgtttctaattctttattccagttactagcttcgtattcaattggatcataaccgattgtaacaactaaatcacttttacgtaataattcatcaccaacttgattgcggaataagcccacacgaccgaagaaatgattttctaattcacgactaattacacctgcaccttggaatgtttctacaactggtaaattcgtgcgctcaactaatttgcgaatggcatttgtttcttctgcacttgaacttctcataccagctaataaaacaggaaatgatgcatttttaatcgcttcaatgacatcattaatatcttgttcactcggtactcctaaatttggtttttggcaaagtgatatagctttagattcaactggtgaagaaataacgtcttgcggaatactaataaaacttgcgccattttttcctgaagtagcaattcgaattgcatttgtcataacttctgataatgattcaggatcttgtacttcttcactatattttgatgaatattttaatagcgcagcattatcaatactttgatgcgttaatcgtaataaatcattacgtttcacttggccacctaacgctaatacaggatccccttcagatgttgcggttaataatccagtagttaaattacttacaccaggaccacttgtaacaagtactacacccggtttgcctgttaatcttccaataccttgcgccatcattgcggcgttttgttcatgacgagtgacaataagttcaggaccatcatcaattaaagcattaaatagatagtcaatctttgcacccggaataccaaaaacatattctaccccattatttttcaaagtatcaataaccatatcggctgcagtgtactttttatcagtcatttatattcatttcccttcaaatgtgatgtatagatgtgtattacatgtaattactttgtgatttgtaatctaatgatagttacgcaaaattaatgatgtttatcaaaattttacatgtacgattagatttgtaatacataaaaattgccttcagtacattatataacctttgttagatgaataaaaatcgttatttgtaatactaagtattccaaaaatgcatgaatagattttgtgcgttgtgattatgagggatgttggattgattgatgtagaggattgttacgatatttttgggatgtggtgtttagtcaatggcgggctgaaattgtcgttttatggtgggctgaaaatgctgttttatgtcgggcttgaatttgtcgttttatggagatataaaaagccacagcaagacttagatctaactgtgacttatacatttcatacttatatttatcgattggttttatagttataaatgatagaagcagttcctaaacaaattaagaagatactcattaaatatatagaaaagttatctgttttaatataaaacctaaaaagtagaaacaccagcatcgcaacaataaaataaacaggaataaaagctttcttccaaaatatagaatctttcaattaagtcactccttattttgataacactcttaaatcatggttcttgagttatcatctggttatcatccgatagctctttcccttgaatatctattattagaacactatcgtacggtctccgcaagctaaatgacaatttaataatgtacacttttgattgtgtaagcatgtacaaattatacgtgtaaatcaataattcatagttgaattaattctatacctgagacattaattcatttatactctattccatattccccacacaaacgcaaaaaaacacctcgacataacatcgaggtgttttgtatatatatcgtccgacaattaacgttttgagaattgaggtgaacgacgagctgctttaagaatttgtttttttacgttcagaaaattttagaatttcgcatgattatatagactgtcgtacaccttgatattaaaggatttcttcaattttgaatttcattgattttcatcaaattgaagcaaagggtattaacggggtattaattttttaaaaaaatctgctggtcggtggattcaataattgatcttatttactgtatttgacttctatacttttgaaaaaattttctatatcaactttatccatatttaaaatatctttattgaacacacaatgcaaatatggttttgcagaaaaaaaagtattgccttcacttatcagttgataattaacatccttaaaatttaaataaataataataccatcattttctttggctaaattctttattttcgaagaagataaagaattaaactcctcattcacatgttgtttattatattctggtttaaaaaatgtaattaatgatatctctgataaatcaatatattctttattaggtatactttgctctaaaattctttttaatcgagacacagcctctttaccatattggtttgtaatataaatattgtcaggctgtatcttgtaaaatattaagacagtctttctattttctggctgataagtcataatttcttgtaatttttcatgacctttccctattctatcaatgacatttctattaccctctgtaccaaaagattgcccaatatataaattagtaatttttaatgtagtatcatctctgtttgtaaaatattcattatattttttataccccattatgttccaaacgtcttcagagaatacttttatcaaattatcactatatttataaacttcagagtaatatactttatccaatacaacgttttttttatattgttcaaatacttttgagtacatactacaatcatcagatatttttttatcatacgaggatattaaactttctatttttttatgaattaacaatttttgaacatttaattttttaaataattcatcaatatattttttccatacttctttgaaatttatttcattttctagatatttcattaaaatttcattaaaactatctaagctctctctatattctgatgattcgatttttgtattgaattcttctttaacatagttagaagaaaaaacaatttcaaatattggtttaataaataaaatataaaaaccatactctacatcaaacttgttttcgaataaatgttttacaattttctccaattcaccacttaagtatacctcaatattgtaaccattaattttatacttcaaatcatcatctcttatatcatttaattcaaatatatctcttctgaatataatattctcatgtatatactttgaaatgtcaaatatacaatctttatttgttttcgtatttaatatagatattcttcctctatcaagtaatttcattgtatattcatctacatagttgaaggaatataaatataaaggtagcttagattttaagaaaaattcttcttccttcattttataaaagtcttccattgttattattttagtacctattaactctacatttaaaaaattactattattcatttaatttacctttatatattaattaaattttaaaattattaaactcttaacttatactacttacaaccttacatagatagtactttattaatagataacttatactaaaaaaatataaagcatataaattaatctataatatccgtattaaataattcatcttcaaaaattattgtataaatatcatttgttattattttctttaaatacctaatgttatcgatatctatttctgtctctttatatttctctaacaagttatatgcggtaactattcttttttctttttcatttagagatgatagtatttcatttaatttattttctattactttctgcttttcttcctgtgttaaatataaaaatttaatacaggaatctattctagaaaataccggttctccaatattaactattgcttcttcaatactattaaaattagatgttagaatgaaaatacaatttgaaacgtctactttataattggcatcttcaataataccttcatcaaacatttgatagaaaacattgtaatagattggtaataccttatcaaattcatcaattaaaacaacattagtttcacgatctactaaatcttttgacaatgatactttggcatgttcatctccaaagatataattaaaagattcatcattctgcatcatagaaaattgtattctagtgatattacctttatatttttttgctatttctttggctaattctgtttttccaacacctgatggaccatagtaaagcattacggtcggtttattattttctaaggaagtatgtttatataaatctatgctcatttgttttttagcgtctgtttgacctattattttagaaccagccatctgctctttataaaaatttattacatcatctttttttaatgttgtatattcatagtttatttctattatttcagaatcgtgaaaactatttagtgattgaaatactctttttggaggattctgaatatagattttcttaatatttctacctaaagtaacgatatttataaaattagtaataacatgagttgttacagaagcaaagtcgtttgaaaatatcacaagattttctatctcagtatcaaaaataccatcaacatcatgagttccaaatgtatcacttgctcgcactatgatattgtattctctgattaattccatgaagcggtgatattctttaacttcagaattaatatattcattaaatccacaaagcggtcccgtataaacatgaatttccatttatttcactcctgcaagaataacatcatacacttgatatttatcttctttagttgcttctgatctaattcccttaaactttccaattccactaggtttggcaccttgatttagatcaaactctttatcgtaatttagattttctttgcttatttcaccaacaagtactgagtagagtgttaaattcataaattttaaatcttgtattctatagttatttttaaaagattctatattaaatctaaaaactctgttttcattccctcttgttcctattaattcaaaatagcctttaatacttctaatcgcttcattcatttttgaaacatcaaatgatagctcctcctcgtctagatgtttagatccttcaaacatacttgctatgggggtaatagtcgcgaaatatgtcatcgtatcttgttgaatatttagtttaaacccctctgaaatatcaataatagtttttttctttctaaactctactgtatccaaaaaatcatatattaatgtattctctaaaattgttttggctactcgctctccagttatatttccatttatacctgcactagccgaagcactcgctgacatcccaagtaaagaatcaaaaatttgttttacagcgctttgcttaccaaattccatgttcactttagattcaccacttgcactacctttttcatcatgcatcaactgaactgttttagtaaggttacctttcttctctatctgtaataaatccattgctgatagttcatcaaaataaattatttttttgatagtatttgtcaatatatcctctccttaatctaatacttcaaaatctggtaatttatctattaatccaagagttttcatacttacagtaataactgataaaagcagatttaaaatgtaattcggatcttcactaaattcattaggatcatctaatattccagatttcttgtcgatgcttacgttgtactgatctataatccattcaatagcaggcttgccattcacaatataattatatactttatttggaatgttagtaactgtaatatcggtattgtatattactgtatccaacacgccctttttagggtgcttcatttttcaactttataattcggattcatattattataaattatttctacaccatcccaattgagttgtttttcataatttaaatgtaattccactaactccctaccaatttcaacaaatccatatacatcctttaatatcggtattcgcggaaaacctttactcaaatcacttgaatatttgttcacataatatttatgatgcaaaattgcatatatataatatactatctcttctgaattaagatttattttctttttaaaagaattagaaatattatctacaagcctcaaactatctttacctttgtatgtagcaaagcctttgccattaccaataaattggaaattaggtaatatgtccgtgatcatagccgagaattctttattcattccctgtccttgtatataaatcacctgtccagtattctccattatattataatatctacttggcatttccataatatttttgtcgtacactatccatttttttgtaaatggtctatgcataaatttaacaattctctctggattaattgaaatattttttcctttagaaaatttttgggtaagtcctcgtgtccaactaataaatgtttcatctttgttcactaaatttatacgttctcttgaatctaagatatcaattaatctatctatttcagaattatagttatctacaagtaattttgcatttactaatgctttttcattcgaaaaatttgttacccaattatctcttgctgaatttactccattaaattgatctaaatatatagaattttcaatatccttggaatcatacattggtaaataattctcatagtttatgtctcgttgattaatccaatcattgtttttatcgggtaaaacattcaaacttttcaaattcacaattgattgatgtttcattaaagtatctaatttttgctctctagttaaatattcaccaatgtcattataatagatatcgtgattgtaacttccatctttaactaaaatagatatagctatcggtgctctacttcctgatccaaatatttttccaccttcttttcttgatttttcaccctgtgttcgttggtcgcctctcaaattaattatgtacagatagttaaattcatcgtataaaacttttctaaatccatcagtgctttgactatcaataaatgatccatttgttacaaatcctataataccttttttccaactctatcagttgcccatcgaaaagcctgtatatacgaatcatataatgatttttttaaatttgctgttgaaaaatttgcataggtatttgctatttttgcatttaatttttcatattcatttttttattatcattatttacactagattgaccagcagaatacggtgtatttccaattatgacagtaatattttctttttgttgtttttttaaccttttatcgtttagagtaaagtattcaaatcacttcacttccaaaaaaataacagaatatcaactatttattgttctccacatttcatggttcttcatcttttatggtgggaaggtaaaaattcatttatattctacacattccatattcgccgcaaaaacgcaaaaaaacacctcgacataatatcgaggtgttttgtatatatcgtccgacaattaacgttttgagaattgaggtgaacgacgagctgctttaagacctggttttttacgttctttcatacgtgggtcacgagtaagtaatccagcgcgttttaaagaacctctgtattcaggatctgcttctaataatgcacgagcgattccgtgacggatagcttgagcttgtccagtgaaaccaccaccatgaacgttaactaaaacatcatagttacctttagtttcagttacatcaaatggttggtttaagtctaaaattaatgattcgaatggtaagtattcgcgtacgtcacggttattaactgtgatgttaccttcacctggtactaaacgtacacgtgctactgagtttttacgacggcctgtgcctctatattcaacttgtgccaaagtcatttcctccttctaattaaccacgtaattcgtagttttctggttgttgtgcagcgtgtggatgttcagcgccaccatatacaaataattttttaccttgtttttcgcctaaacgagtgcttggtaacatacctttaattgagttttcaattaaacgttctgggttagttcttcttaattcaccagcagtgattgatttgataccacctgggtgatttgagtgacggtagtaaactttgtcagtttctttgttaccagtaaattcgatttttgatgcattaataacgattacataatcaccagtatcaacgtgtggtgtgtaagttactttatttttaccgcgtaagatagatgctacttctgatgataaacgacctaatgtttggccttcagcatcgataacataccatttgcgctcaatgtttgattcatttgccataaatgtttgacgcataataattgtcctcctaaaaaataaatgcttctattcaagctataaacagtttcataacctaatagatgatttcatttgtttcatttttaaaacgtttaatttcatttattttgttaactgttgttcgtttctgcttatatatcttgtaacacaataagtttccggggcttatcgtggggtggatataaaacaataccgttaataatcttataatttcacaagctttttgtcaatggcaatcagtcattttgtaatgattttttacgatgtattttgatatcgttaccaaagtcttttaataactcattttcatctaaataaattttctctaaatataatccttcagccggtgcagtgaaaggtacattcttacgattctttgattcaagaagttttggtacatcagatacttcatgtcgcccttttccaacttctattaaaaatgcaactaagacacgcaccatgttatataaaaatccagatccagtgacaatataatcaaagccatcatctgtctttacgatttcactttggtataatgttctaactttgctttctacttcagttttttgcgaacaaaatcccgtaaaatcatgtgtacctatgaattgttgcgccgctctgttcattttacctaaatccaacgtttcaggaataaatgttttcaaaccactttgaaatggatcgcggtgttgtgcttgatatactttgtagcgataacgtttacctacacaatcataacgacaatgaaaatcgtcatcgactgtaactacattgttgacataaatatcatcaggtaacgttcggttcattgcatattgccattgtgacataggtatattcagctctgtgtcgaaatgaaagtattgctgtatcgcatgtacacctctatcagtcctacttgaaggatggattctcacatgtcttttatgcatgcgttgtaatagcttttcaaattgttgctgtaccgttcgaccattttgttgaatttgaaaacctagaaaattatttccttgatacgcaatttctactaatatacgcatgaatttacactcctgaatattttaatacgaataaaataattgcaattgggataatcatggttaaagatatcgtatctctcaattgccatttaagctgtctgtagctcgttctcttaacattggcatcataacccctaacttccattgcgaccgctaattcttcggcgcgttggaaagctgagatgaatagtggcactagtaatggaataaatgatttaatacgtgttgcaatgttccctgaacttatttcagaaccacgcgacttttgcgccaaaatgattttatctaactcatccattaacgtcgggatgaatcgtaacgcaatggacattatcatacttaattgatgaactggtaatttaaacatctttagtggtgcaagtaatctttcaaacgcatctgttaaatcaattggacttgtagatagtgtcataattgttgcaatcattacaatcccaattaaacgcagtgatatatatagcccttctaaaataccattagtttcaatcgtgatgccatgccattcaactaatacatatccacctttagttaaaaatatatgcatcattaatgtgaagattaaaaagaaaaatattggtgttaaacctttgattaggaaccataattgaatttttgctaatctcataatgaataagataagtgcaaacacccaaagatatgttaatggtgaatgacagaaaaatattaatataataaaaagaaaaacaaacattaactttgctcttggatcaagatgatgaacaaaagaattaattggtaaatatcgccctataatcaatttatttttcatgttgccactccttatacaagcttacaaatgcttcttcagttaaggcaatatcttttaattttgtttgatatttttgttcaaagtcatattgtaactgaacaatttctggcaaaccaatatgccaatccgccaatttttttttatctttgaagagctcttttggtgatgtttgcgacactatactaccttctttcataacgatgacttcatctgcataacgcgcgacttcattcatatcatgtgaaattaggataattgccttattttcatctgtttgtagtgactttagtaatctcattacttgtcgtttactttgtggatcaagtcctgctgtaggttcatcaaccacgataatatcaggattcattgccaatatcgatacaatcgctattttacgcatttgtccacctgacatttgaaatggtgattgtgacattacatctcttgaaaagcctaaatccatcaacagacgatgggcatagtttttggcttcatctaaattcattttaaagtttttaggtccaaatatcatttcacgctctactgtgtcctcaaataattgagattcgggaaattgaaataccattccaattctttttcttacaggtctaatatatttatctttggtcttatgtgtaatagtaatgtcatcaactgtaactgtcccagtagtcggctttaacagcgcattaatattttgtatcaacgttgatttaccactacccgtttgtccaacgatggcgtaatatttaccttgttcaaattctgtattaacatcatgaatagcttgatgctgatatggtgtccctttttgataggtataacttacattgtcaaaccgtatagtcatagttgatccaccagcccttcataagttaagaatgatgtttggtgtcccagcatttgatttattttgattgggaatggcaaatctagacctattcttgttaactcttctgcattgtcgaaaatttcagtcgctgtgccttctttatagacagtccctttattcataacgataacatgatctgcttccatcgcctcagataaatcatgcgtaatagaaatgattgtaatattatgttctgatttaacttttctcactaaatccaataaattttgacgtgcatcaggatctaacatagaagtcgcctcatctaatataatgacagaggggttaagtgctaatacacttgctatagccacacgctgcttctgtccccccgataatgcattaggttcataatctgcacgttctaacatatcaacttgtttaagtgcttcgctgactcttctatgcatttcgtcatatggaaccgcatgattttcgagtccaaatgccacatcgtattttacaattgaaccaacaaattgattatccggattctgaaatacaattcctatgtcttttcttaacttttcaaaattatcatcagttatagcttgattattataaaaaatttctccagatttaactttctctatgccaatcattaacttggcaattgtagattttccagaaccgttatgaccaacaatagatgtccactgacctttaggtatattaaaagaaacatctttcaatgtgaaggatgcatcactttgatattgaaatgaaacatttttaaatacaataactgaattcttatcctccacttgtctctctcctttacgattcgtgtatctatcatattttacaatatttataaatcgctgtatatgacattgactgggttctctatatattactagtattttctgactcatttctagtctttaaagtgttgtttaacaactaatgataaggacttttattcctctctaacaattatgtataaacgttaataaaataaatgatttactaatataggggtggtcgcgtttgattcaacgataatactttcacttcattcagttctagtgaaattgatcaaactagcttcatcatatttttagattcgcactcaaaaaagtaaatataaagaaatcggacttaaaaacatttctgttcataagtccgatattttattcaataaaaaagcgcgcaccccatcataagtttgttgagttcacgctttaaatctttatttagttgatggggtactctgagctagacaatatttgtatgtggcaaacattatcgttgcactcatttgctttatataaaagtagttagtgtatttatataaattcttatactaattcgataattactgattcagcaccgtcaccgcgacgagggccttgtttaaggatacgagtgtaaccaccttgacgttctgtgtaacgctctgcgatttcaccaaataatttttgaagtgcagtttgtgtagtttcatcttcgtttaagatttcaacattacgtaaagttttagctgcattacgacgagaagctaaatctccttttttacctaaagtgattaatttctcaacaacactgcgaacttcttttgcacgagcttctgtagtttcaatacgttcactaataataagtgatgtagctaagtcacgtaacatagctttacgttgatcagaagtacgacctaattttctgtaacccatgagttaacctcctttatcaatcttcttttcttaatcctaatcctaaatcttctaatttgtatttaacttcttctaaagatttacgacctaaattacgcactttcatcatgtcagcttcagatttgtcagctaactcttgaacagaattgattcctgcgcgttttaagcagttatatgaacgtacagataagtctaattcttcaatagacatttctaatactttttctttttgatcttcttctttttcaatcatgatttcagcgttttgcgcttcatcagtaagaccaacgaagatattcaagtgttcagtcattatttttgctgctaatgaaactgattcttgtggtgtgattgaaccattagtccaaacatccaatgttaatttatcaaaatcactgctttgacctacacgtgtattttcaacagtatagttcacacgttcaacaggtgaatacaatgaatcaacagggattacaccaattggtaaatcactagtattattttgttctgctaatgcgtaacctctacccttgttagcaactagacgaatttttaagtgaccacctttagatactgttgcaattttaagctctgggtttaaaatttcaacatcactatcatgtgtaatgtcgcttgctgttacttcgccttcatcacgtacatcaatttctaaagttttatcttcttcagagtaaattttcaatgctaattgtttaatgttcataataattgtagaaacatcttcaactacattgtctactgctgagaattcatgtaaaactccctcaatttcaatatacttaacggctgcacctggtaatgaagatagtaggatacgacgtaaggagtttcctagtgtagtaccgtagccacgttctagtggttcaacaacgaacttaccgaatttagcatcttcactaatttcaattgtctcaattctaggtttttcgatttctatcatttaaatatcctccttatatacgtcgacttaatttaaaatgtttgctcagtgacctgtaacaataccatcataaattatacacgacgacgttttggtggacgacaaccgttatgaggtactggagtaacgtctctgatcgcagttacttctaaacctgcagattgtaatgcacgaatagctgattcacgacctggaccaggtcctttaactgttacttcaactgtttttaaaccatgctccatagctgatttagatgcagtttcagaagccatttgtgctgcaaatggtgttgattttttagatcctttgaatcctaatgcaccagctgatgaccatgataaagcattaccgaactcatcagtgatagttacaatagtgttgttgaatgttgaacggatgtgtgctacaccattttcaatattctttttcactctacgtttacgagatacttgtttacgtgccatttaaaatttgcctcctttacctattattttttcttgttagctaccgttttaactggtcctttacgagtacgcgcgttgtttttcgttttttgaccacgaactggtaaaccacgacggtgacggataccacggtatgatgaaatttccattaaacgtttgatatttaagttagtttcacgacgtaagtcaccttcgactttataaccgtctacaacttcacggatgcgacctaattcgtcatcagttaaatctttcacacgagtatcagctgatacgttagcttcttcaagaattttttgagcagttgacgtaccgataccgtatatataagttaatgagataactacgcgtttttcacgtggaatatctactcctgcaatacgtgccatattaatttacacctctcttttattaaccttgtctttgtttgtgttttggattttcacaaattaccattactttacctttacgtttaatgactttacatttttcgcaaataggttttactgatggtcttactttcatttttatacctccctatattatggagtgacgattatttataacgataagtaattcttccgcgtgttaaatcgtacggagacatctcaacagttactttgtcgccaggtagaatacgaatgtaattcattctgattttaccacttacgtgagctaaaatctcatgaccattttctaattctactttaaacattgcgttcggtaaagtatctaatacagtaccttctaattcaattacatcttgtttagccattgattaacttccccctttttgcaatagtaaggtaatcgtcaatagacaactttattgttacgaatctatcagtgattaattttataagttaaacaaaaattacgggaattaattatcgttaattgccactctcatctatctaatatgattaaatcatgcctcacttaaaatagaccgctaaaagttgatctattacaaatgatctaaaatatcaatgacatctttggtaacgtcgctaatatcttttgaaccatcaatatttttcaatacacctttttgatcatagaaatctaaaataggcttagattgtttaatattaacactcaaacgattagctaccgtttcaggattatcatcttctcgttgatacaatttaccaccatcgatatcacaaataccttcgaccttcggaggattaaatacaagatgatacgttgtaccacatgactcacagattcgacgacctgtaagacggttcattaattcttcttccggaacttcgatattgatgacagcatcaatgtttctgtcaagctcagacataatattatttaatgcctcagcttgctcgattgttcttgggaagccatctaataaaaagcctttttttgcatcgtcttcagaaattctttccttaacgatacctacagtcacttcatcaggaactaattcgccacggtccatataagacttagcttctttacctaattcagtttcttcttttatagcttttctgaacatgtcaccagttgaaatgtggggtattgggaatttcttgacaatttcacttgcttgagttcctttacctgcgccaggtaaacccatcaaaatgatattcataagtgccctcctaaaattatctaccaccaaagcctttatattctttttgagatacttgagcttctaaagatttcattgtttcaatcgctacaccaataacgataagtaaacttgtaccaccaatctgaattgattgtggtaatcccataaacttagttgctaatatcggtagaattgaaataacggctaagaagatagaacctacaaaagttaaacgatataaaactttagtaatatattttttggtttgttcaccaggtctaatacctggaacatagctaccttgtttcttaaggttatcagccattttttccggattaacttgtacaaatgcatagaagtatgtgaatagtataattagtacaatatatacaaccataccaacattacttgaaggatttgcagcattcgcaatgttttgtgcccattctttatctggatagaacaacgttaatgttctaggcagtaagaagaacgccattgcaaagattacaggaataacaccggctgagttcacttttaaaggtagataagttgcctgtgaacctaatctttgagcagtttgtttcttagcatattgaatcggaattttacgaacggcttcaagtacataaatagcacctacagttaatagtatcagtgacactaaaagtcctaatactttcaaccatgctaatgatgtatcttcttgcccaacgaacgcagtttgtccaaattgaattagactggctggcaacgttgataaaatacccgcaaatatgataatagaaataccattaccaacaccgaactgagtgatttgatcaccaagccatattaagaaagcagttcctgctgtcaaaactagtgctattaataaataactcataattgactgattgataatcagcgcacctttgagataattattaaattggaatgccatacctatagattggataaatgctaaagaaattgctaaataacgagtaacgttatttaactttcttctacctacttcaccttgttttgcccattctgagaatttagggacaatatccatttgtaataattgcattacgattgatgcagtgatgtagggtacaatacccattgcaaaaatagaaaatcgtttcaaggctccgccaccaaaagtatttaataactcagtggcaccttgagaaccttggggattatcaaaagctgcaggatttactcctggagctggtatataagtccctattttaaaaattactaacattgctagtgtgaagaaaatcttgttacgaacctcttttgttctaaagaagttcacaagggtttgaatcattagatcacctcgtgtgctccacctttagcatcaatagcttctgctgctgaagctgagaatttatgagctttcactgtcaatttcttatcaagtgaaccattacctagtattttgataccagatttttcattcttaacaacaccagattctactaataaagctggagttacttcagtaccatcttcaaatttattaagttggtctaagttaacaatagcatattctttacgatttatgttagtaaaaccacgttttggtaaacgacggaataatggtaattgaccaccttcaaatcctggtcttacaccaccgcctgaacgagctttttgacctttgtgtccgcgaccacttgttttaccgttacctgtcgcaacaccacgtccaacacgattgcgttctttacgtgaaccttctgccggttttaactcatgtaatttcatttcggcacctccttgattatttttcttctactgttactaagtgcttaactttgttgatttgcccacgaatagcagggttatcttcaacaactactgaactgttagtctttttaagacctaaagcttcaacagttttacgttgtgtttcaggacgaccaataacactacgagtgagggtaatttgtaatttagccataactagttttccctccttaattgtataattcttctactgttttgccacgtaatttcgcaacatcttcagcatttttaaggttttgtaaaccatcgattgtagcacgaaccatgttgattggtgtgtttgatcctaatgatttacttaagatatcagtgatacctgctaattcaagtacggcacgaacaggaccaccagcgataactcctgtaccaggtgcagccggtttcataaatacgcttcctgaaccgtaacggccagtaattgtgtgtggagttgtaccttcaacacgtggaacaactactaaatcttttttagctgcttcaacagcttttttgattgcttctggtacctcttgagctttaccagtaccgaaacctacacgaccatttttgtctccaactacaactaatgcagtgaaacggaaacgacgaccaccttttacaacttttgctacacggttgattgtaacaacgcgttcttcaaattctttcgtctcttcttctctacgagccatgtatttgtccctcctttaaattaaaattctaatccgctttctcttgctgcttcagctaatgctttaacacgtccgtgatataaatatcctccacggtcaaatacgatttctttaatgcctttgtcagcagcttttttagcaattgcttcaccgactttagttgctaattcaactttagttgctgtagtagcaatgtcgctgtcttttgaagaagcttgagctaatgttacgcctttattatcatcaataatttgagcgtagatatgcttgtttgaacgatatacgtttaaacgtggcttttcagctgtacctgataagttagtacgaacacgagcatgtctttttaaacgcactttatttttatcaattttactgatcatttcaatactcctttctttagagtttatctattatttaccagttttaccttctttacggcgaacgtattcaccttggtaacgaatacctttacctttgtaaggctctggaggtcttactgaacggatgttagatgctaatgctccaacttgttcttttgaaataccttcaactttaacgactgtgtttttctcaactgagaaagtaatgttttcttcagctttaatttctactgggtgagaataaccaacgttaaggattaagtctttaccttgcatttgagcacggtaacctacaccaacaagttcaagtacttttacgtatccttgagaaacaccttgtaccatattgtttaataaagcacgagttgtaccatggtttgttctatcttctttagaatcagatggtcttacaacttcaattgtgttttcttcttgtttgaatgtcattctttcatttaaagttcttgataattcacctttaggacctttaacagttacatgatttccatcaaaagttactgttacgtcactagggatgtcaataattttcttaccaacacgactcatgttatggcacctccttattttttattaccaaacgtatgcgataatttctccaccaacattacgttttcttgcttctttgtcagtgattacaccttcagaagttgatactaatgcaatacctaaaccatttaatactttaggcatttcgctagcttttgcataaacacgtaaacctggttttgaaatacgttttaatcctgtgataacacgctcatcgttttgaccatattttaagaataaacgaagtacaccttgtttatcatcttctacgtattcaacatttttaatgaaaccttcactctttaagatttcagcaatttcttttttaatatttgatgcaggtaattctaacttctcgtgacgcaccatgtttgcgtttcttacacgagtaagcatatctgcgattggatctgtcattgtcattgattgttgcctcctttcagactcttttttattaccagctagctttacgaacgccagggatttggcctttgtaagctaattcacggaaacaaatacggcataatttaaatttacgatatacagaatgtggacggccacaacgttcacaacgagtgtattcacgaactgcatatttttgttttttttgttgcttagcaaccattgaagttttagccacttaattagcctcctttaaataattatttacggaatggcataccgaagttagctaacaattcacgagcttcttcatcagtgttagcagtcgttacgataacaatatccattcctctaactttacttactttatcatagtcgatttctgggaaaattaattgttctttaacacctaaagtgtagttaccgcgtccgtcaaatgcttttttagaaacaccttggaagtcacgtacacgtggtaatgatactgaaattaatttgtctaagaattcatacattctttcaccgcgaagtgttactttcgcaccgattggcataccttcacgtaaacggaaagtcgcgattgattttttagctttagttactaatggtttttgaccagtgatcaattctaattcttcaacagcattgtctaatactttagaattttgtactgcgtcacctacacccatgttcacaacgattttatctatttttggtacttccattactgaactataattgaattttttcattaagttttcagtaacttcagtgttaaacttttcttttaaacggttcaaagtgggatcctcctttcaacttgttattaattattagatttaatttcttcgccagattttttagcgatacgaacttttttaccatcaacaaatttgtaacctacacgagttggttcgtttgttttagggtccaataattgtacattagaaacatggattgctgcctctgtttctaagattccaccttcaggatttaattgagttggtttttggtgttttttcataatgttaacaccttccacaacgacacggtcttttttaggtagagtagcaattactttaccttctttacctttgtctttacctgcgataactttaacgttgtcaccttttttgatatgcatgtgggcacctccttatttgtattggttgttattaattaaagtacttctggtgctaatgatacgattttcatgaagttaccttcacgtaattcacgagcaacaggtccgaagatacgagtaccacgtgggcctttgtcatcacggatgataacacatgcattttcatcaaatttgatgtatgaaccgtcattacgacgaacacctgacttagtacgtacgattacagctttgacaacgtcaccttttttaacaacgccacctggtgttgcatttttaacagtacatacgataacatcgccgatgtttgctgttttacgaccagatccacctaatactttgattgtaagaacttcacgagcaccagagttgtctgctactttcaagcgtgtttcttgttggatcattagttaaacctcccttatctctaaacttgtattaaataattactgactcttcaacaatctctactaaacgaaaacgttttgttgctgataaaggacgagtttcttgaattttaacaatgtctcctaatttagctgaattgttttcatcatgagttttgtattttttagagtattttactcgtttaccgtataatttgtgtgttttgtaagtttcaacaagtactgtaatagtcttgtccattttgtctgaaacaactttacctacataaactttacgatcgtttctttcgctcacttttgtaacctcctcttacttaattattgattagccttactttgttcaatttctctttcacgagcaacagtttttagacgtgcaatcgtttttcttactgtacgaatacgtgcagtttcttctaattgacctgtagctaactgaaagcgtaggttaaaaagctcttcttttgaagatttgatttgttcttcgatttctgaagtggttaagtctctaatttccttagctttcatttgtttcaccacccaattcctcacgttttacaaacttagtttttactggaagtttgtgacttgctaaacgtagtgcttcacgcgcaacttcttcagaaacgccagcaacttcgaataaaattctacctggtttaacaactgcgatccagccttcaaccgcacctttaccagcacccatacgtacttctaaaggttttttagtatatggtgtatgtgggaagattttaatccaaactttcccgccacgtttcatgtaacgtgtcattgctatacgagcagattcgatttgacgagatgtgatccaagacgttgttgtagcttgtaaaccaaactcaccaaatgttacgtagttaccgcctttagaacgaccagttgttttaggacgatgttgacgacgatattttacacgttttggtagtaacattattattttcctcctccactagtgttcttagtaggaagaacttctccacgataaatccatactttaacgcctaatttaccgtaagtagtgtcagcttcagcgtgtgcataatcgatgtcagcacgtaacgtatgaagtggaacagttccttctgaatattgttcagcacgagcgatgtcagctccgcctaaacgaccagatacttgagttttgatacctttagcaccaagtttcatagctctagtgattgcttgtttttgtacacgacggaatgaagcacggttttctaattgacgtgcgatgttttcagctactaaacgagcgtcaagatcaacttttttgatttcaattacgttgatgtgtacttttttatcagttaacgcatttaatttgttgcgtaatttttcgatttctgaaccgcctttaccaattaccataccaggtttaccagtatgaattgcaatgttgatacggtttgcagcacgttcaatctctacgtgagaaactgatgcttcttttaattcattatcaataaatttacggatttttaaatcttcgtgtaaaagtgaagcgaagtctttttcagcataccatttagcttcccaatcacggataataccaacacgaagtccgattggattaattttttgacccacagtattccctccttaaaagttaattaagcttctttagcttcttctttaccgtcacttacgacgattgtaatgtggcttgtacgtttgttaatcgcacttgcacgaccttgcgcacgtggacggaaacgttttaatgttggtccttcgttagcatatgcttctttaactactaattcatctgtgttcatgtcatagttatgttcagcattagctaaagcggacattaatactttttcaattactggtgatgaagctttgtttgttaattttaaaattgcaatagcttcagcagcatttttacctctgattaagtcaagaactagtcttactttacgaggtgcgattcttattgttctagcaaccgcttttgcttccattaggatgtcctcctctacttaatagatattatcttcttgttttcttgtcgtctgcaacgtgtcctttgaatgtacgagtaggagcaaactcacctaatttatgacctaccatatcttcagttacatatacaggtacgtgtttacgtccgtcgtatactgcaaaagtatgtccgatgaaattagggaaaattgtagaacgacgtgaccatgttttgattacttgtttcttttcgcttccttcttgagcttcaacttttttcattaaatgctcatcgacgaaaggtccttttttaatactacgagccatttgggcgcctcccttcttattatgtgcgtgcagctttaagccgcacacccaaataagttgattatattattttttcttacgtccacgaacgataagtttgtctgatgattttttaccacgacgagttttcttaccaagcgtaggtttaccccatggtgacattggagatggtctaccgataggagcacgaccttcaccaccaccgtgtgggtgatcgttagggttcattacagaaccacgaactgttggacggatacctttccatcttgaacgtccggctttaccaacgttaactaattcgtgttgtaggttaccaacttgaccgattgtagcacggcaagtagataagatcatacgaacttcaccagatcttaatctgattaatacgtatttaccttctttaccaagtacttgagcacttgcaccagctgaacgagcgatttgtccacctttaccaggtttaagctcgatgttgtgtactactgtaccaactggaatgttttgtaatggtaatgcgttaccaactttgatgtcagcttcagcaccactttcaacgatttgacctacttctaatcctttaggagcaatgatatatcgtttttcaccgtctgcatatacaactaaagcgatgtttgctgagcggtttggatcatattgaatagaatcaacttttgcattgataccatctttgttacgtttgaaatcgataacacggtattgacgtttgtgtccaccaccatggtgtcttacagtcaatttaccttggttgttacgtcccgcttttttcggtagcggttttaataatgacttttcaggtgtagttttcgtgatttctgcgaaatctaacgaagtcatattacgacgaccatttgttattggcttatactttttaatagccattgtcgcttacctccttaatggtaattgttttattagttaaataagtcgattgatccttctttaagagttacaatcgcttttcttcttttgtttgtatagccttggtaacggcccatacgttttttcttaggtttgtaattcatgatattaacacttgcaacttttacgttgaagatttcttcaactgccatttttacttgtgttttgttaacacgagtatcaacgtcgaaagtgtatttgtcttcagccattgcttcagaagatttctcagtgattacggggcgcttaagaatatctcttgcttccattatccgagcacctcctcaacttttttagcagcagcttcagtaattactaagctgtcagcattagtgatatctaaaacatttaaaccttgagcagttgtcacttgaacgccagggatgttgcgtgctgataattcaacatttacatcttcgttttcagtaactactaatacttttttaggttgttctaatgtagataatacatttttgaattctttagtttttggagcttcgaagttgaatgcgtcaactacagttaagccattctcttgagctttgaaagataatgctgagcgtaaagctaaacgacgcattttcttaggcattttgtatgcataacttcttggagttggtccgaatacgataccaccgccacgccattgtggagcacggattgtaccttgacgagcacgacctgttcctttttgcttccatggtttacgtccgccaccgcttactgctgaacgattcttaacagcatgcgtaccttgacgtaatgaagcacgttgtaaattaatagcttcgaataaaacgctattatttggctcaataccgaatactgcatcgcttaattcgattgaacctgatttagttccgtctaattttaaaacatcataattagccattatgcatttcctcctttcacttcttattatttattaccttttttaattgaagttctgatttctactaaaccttttttaggtccaggtacgttaccttttactaagataactttgttttctgtgtcaacttgaactacttctaagttttgaacagttacagtgtttccacccatacgtcctggcattttttggcctttaaatactctagaagcatctgaagccatacctacagaacctggtgctctgtggaaatgagaaccgtgtgacataggtccacgagattgtccgtggcgtttaattgcaccttggaaacctttaccttttgatacgcctgttacgtcaataacgtcgccagctacaaaagtatctactgagacttcttgacctacttcgtaagcatccacgtctacattgcggaattcacgaatgaagcgcttaggtgctgcgtcagcttttttagcgtgaccttcagctggtttattagcatatttattagattttgcatcttttttgtatgcttttttgtcttcaaatccaacttggattgcgttgtatccatcaacttctacagttttcttttgtaatacaacattttctttagcttctactactgttacagggattaattcaccgttttctccgaatacttgtgtcatcccaatttttcttcctaagattcctttggtcatcgaaagtccacctcctaaaattgtctattataatttgatttcgatgtctacaccagatggtaagtttaagcccattaaagcgtcaactgtttttggtgttgggtttacaatatcgattaaacgtttgtgtgtacgttgttcgaattgttcacgtgaatctttatacttatgcacggcacggatgattgtgtaaactgatttctcagttggtaacggaattggtccagaaacatctgcaccagaacgtttcgctgtttctacaatcttctctgctgattgatcaattacgcggtgatcataagcttttaatctgattctgattttttgttttgccataattttccctccttattcgtctacatttagtgatagacttctccacgaaaactatcttacacagcgccatggcaaagcggccgggtgtgtcagtaacctttcgcttcatcgcttttcttaaagtccaacgttagttatattacacgaaaaacatcgataaatcaaggcttttcacataatttttctatctgtctaacacatacttttatattttactttatatacttagtcagttcaactattttcgagatattttttatttccttctttattgtaaattcgtaccttgaatcattttattattatcattgaaaattattctatataattagtcataagaacggtggtgaatgaatatgaaaaatggaccaaaattatctttagcacttataggtatctttttaatactttgtgagtttttctatggcattccttttttaggtgcaacgtttattttaagttttggatggcagcctttactctttaatgcattactttatctaattcttactattatattattagtgaatagacaaaatgcgattagacctatagcgattattccaatatttggtatagtaggtagttttttagctattatccccttcttaggaattttgattcattggattttatttttcctaatgattctatttgtcctagttgtattatcagcgccaacctatatacctaataaaaatgctcgtgtcatttacacacaatacaaagatggacatagagaataattcttaaaacctttttaattaggtatataatatagaagaaacacgtccaacaattttaaaagaagtatatttatatcggatatttaaagacattcataatatcgctttatgttatttcgcttcttattttatccttacttcaaagaaaaaaacgactaccaatcattggcagtcgttttttgtgtctggatttaaccatgaacaaatatgaagtacagaatgaatagtaccattaatacatacattatcggatgtacttctttatgttttttagagataagcattgtaattggatagaaaataaatccacacgcaataccagttgcaattgaatatgataaaggcatcataatgattgtaatgaaggctggcactgcaacttcaaaacttttccagtttatctcagcaaagtttgcagccattaatacacctaccaccactaaggctggtgtcgtaactgcacttgttacaacagcgattaacggactaaagaacagcgctaataggaaacaacaacctgttacgatactagcaaatcctgttctagcacctacagcaacacctgaagttgattcgatataagaagttgttgtagttgttccaaaaactgatcctacaatcgtagctaaagaatctgagaacaatgctctaccagctcttggtaatttattatctttcataatacctgcttgagtagcaacagctactaatgtaccagctgtatcaaagaaatcaataaataagaacgttaaaataacaattaagaactgtatcgttaataattgacttgggtctttaaacgcttcaaatgcagcaccgaacgttggttcaatacttggaatcttacccacaataccagatggcatttgaatcaatccagtgaacataccaacgattgctgtgatgatcataccgataaagatagaacccggcaatttaattgcatataaaataactgtaataacgataccgaatatcgccaaaagtactggtggatcagttaaatgtcccaatgttactaatgtagattcatttttaactataatacccgaactttgtaaacctacaaatgtaatgaataatcctatacctgctgaaacagccatcttcatttgataaggaattgcattaataataacttccctaaaccctgtgacggttaatatcgcaaagaatatacctgagaataaaacgcctgttaaaccaacttgccaaggaatacccatggttaacacaacagtaaatgcaaagaatgcatttaatcccatacctggtgctaacgcaattggatatttagctattagccccatgaatagcgagcctacaaatgctgctaatgcagtcgctacaaaaatggcaccttggtccattttcatatcttctgatacgcctttaacacctgctaaacttaaaacttgcgggttaactgctaaaatataggccatagataagaaagttgtgataccgcctaagatttctcttttaaagtttgttccatatttatcgaactggaaatagtttttcacgaatggatgctcctttttttaaaataccttaatagtttaatatcattcttaataaaaaacaataccaaaagcgaacttttcgtttttctgattcaactttgttcgattttatctataaattcaagttctttaatgcatctttaaacggattattgtctaaaccttcatttttattcatatactttttcatttctttacgagatactttaccagaggatttagacttcatacgctgatccatatgtgcttgcgtttcagaatgtccacaaacacaacgatataccgcttctttccctttaccaaacaacgttaatttctttttacagtttggacatcttgcatttgttttgcgctgtacattctttttcgtcttacaagatggatcttggcacacaagcatctgaccatttttagttttaactttaatcatgaatttaccacacgttgggcattctgtggttgttaaattatcgtgtttatatttacgatcactatttttaatcccatttacaacatctttcgtaaaatctttcatttcattaataaatgttttcgcctgatatttaccacgttcaattaaaagtaatttttcttcccattgtgcagttaaaagtggcgacgttaattcttctggtgctaattctaatatttgtttaccttttgacgttactttaattttaccgtctcttgattcaatggcattcatattaaataatttatcgataatgtcggcccttgttgcaactgtgccgataccacctgtttgttttaaagtttgcgcatattttttatccttcaattgaataaagttctgagggttctccatcgcttttaataacgaaccttcattaaaatattctggaggtgttgtttcatgttctctaatatttgtttttgaaatcttcacttcatcgccttctgaaaaaggctgttgcatctctgtaatagattcaccttgtctaatagatttaaaacctaaaacagttgttacattctctttcaaaacaaatgtgtgccctgcaacctctaaagttacagttatcgcgtcatactcgtgcggaggcattaaagcttctaaaaaacgctcgacaatcatatcgtataactttaattctctattacttaagtctgacatgacaggtctcacttctgtaggaataattgcatggtgatcagatactttttgattattaaatatcgacatttttgatgaaaatgttttagacattaatgggcgtgcttggtctttatatgttgttgccatcgtcgcctgaatacgttctttcatagtatctaccatatcagttgttaaatagtttgaatctgttcttggataggttacgactttatgtctctcatataagctttgaagtgtattcaatgtttctttaggtccaattttataacgtctatacatatcttgttgtaaatctgttaaattgtacagtgattgcggatacgacttcttatgtttagtagcaacagatttaatcttaccatcgacatttttcaaattattaaccatctgttctaaagtttctttattggtatatcgctgatttgattctagctgaaaatcaaacccttttaccgttaatgataatgtaaagtattgttgtggtttgaactgattaatctcttgttgtcgtgtatttactaattgaatcgttggtgtctgaacacgtcccagggatagctgtgcatcatactttgttgttagtgcacgcgttgcattaatcccaacaatccaatctgcctcacttctcgctaacgctgcataatacaaatcgttatattgacgaccgtcttttaaatttttaaaaccttgttgaatagcttttttagtaactgagctaatccataatcgacggattggctttttgttaccaactttatccaaaatcaatcttgcaactagttcaccttctcgtccagcatctgttgcaataataatatctttcactttattatctaaaattaacgcttttactgttttaaattgtttgcttgttttaccaataacaacagttttcatatatttaggtataattggaaggtcttctaatcgccattcctttaaatttttatcgtattgttcaggtgtcgcatttgtcactagatgacctaacgcccacgtgacaatatattggttattttcaaagtaaccattacgcttctgatttatttgtaaagcatcagcaatatctcttgcgactgatggtttttcagctaatattaaagatttcataaattatcctttctcatacgttcttttatttcgaacgtgcttcatctattccactaatctttgatttaaattcaatgattgcaaatgatgtgttaaatgtattgtaacatgttaatatcactattaactttcatttcagttgaaatactatataataaaagtaacaaaaagtacggaggtaatgacatgagcatagttcagttatatgatattacacaaataaaatcgttcattgaacattcgaattatgaatcagcatcatacttatataaacttcctcaacagtacaatgaaatagatgtattaataaccgatgcgattgaatcacctggtgtattttcgattaaagaaaacgattcaatcaaagcaatcatattgtcttttgcatacgataaaaataaattcaaagtcataggccctttcgtggctgacaattatgtattatctgtcgatacgtttgaaacgctatttaaagcaatgacttcgaaccaacctgacgatgccgtctttaacttttcttttgaagaaggcattcaacaatacaaaccattaatgaaagttattcaagcaagttataacttcactgactattacatagaagcccgtacaagattagaagaagatatgcaccaaccaaatatcattccttatcacaaagggttttatcgtgctttcagcaaattacacacaactacatttaaatatcaggcacagtcaccacaagatatcattgatagtttagacgaccatcatcatttgtttttatttgttagcgaaggtttacttaaaggttatttataccttgaaattgattcacaacagtcaatcgccgagattaaatacttcagttctcatgtagattaccgtttgaaaggtatcgctttcgagttgcttgcgtatgcattgcaatatgcttttgataattttgatattagaaaagtttattttaaaattcgtaataaaaataataaactcatcgaacgatttaatggtctaggtttccatatcaactatgagtacattaaattcaaattcgaatcacgtaacgtaaaagatcaaacaatccctgaataaaacaccaagcaaataccctacagtacatcattagcatgtattgtgggtttttctactttttgtaaatattgaaaattataagtagttgttttttactattagggcagaatgctttacaataacatgcaagtgtcaattaaggggagcacttgcataaatagtataggagagtgagtagtcttgcaatttcttgatttcttaatcgcacttttacctgctttattctggggaagtgtcgttcttattaatgtgttcgtcggcggtggaccttacaaccaaattcgtggtacgacgctaggcgcactcattgttggattaggtttacttattactggtttcgcaaaattcaataatcctactgtaattattgtcggtcttatttctggtgcattatgggcgtttggacaagcgaatcagcttaaatctattagtttaatcggtgtatcaaatactatgccagtttctacaggtatgcaattagttggtacaacattattcagcgttatctttttaggtgaatggtcttcaatgactcaaattatctttggtttaatcgccatgatattattagttactggtgtagcacttacttcacttaaagctaaaaatgaacgtcaatcagataatcctgaatttaaaaaagcaatgggtattttaattgtatctacagttggatatgtaggtttcgttgtacttggtgacatctttggtgttggtggaactgatgcattgttcttccaatctgtcggtatggcaattggtggctttatcctatccatgaatcataaaacatcacttaaatcaacagcacttaatctattgccaggtgtgatttggggaattggtaacttgttcatgttctattctcaaccaaaagttggtgtagctacaagtttctcattatcacagttacttgttatcgtttcaaccttaggcggtattttcattttaggagaaagaaaagatcgtcgtcagatgacgggtatttgggcaggtattattattatcgtgatagctgctataattctaggtaatttgaaatagaaagttaaatactcatgtaacgtaaaaatgtaatcacttctgaaaataaccattcacttatagaatgattaaaattaattttcgggaattttacgttgaatgttcctctatatgtcctaggaaatacgtggctctaaaaacaaaacgcaataacacatcatgacattaatcatgcgttttaagactttaaaattagcgatacttttaaaatcttgatgatattcatatatcaagtatgcgccatacatatgaagtggatagctgcataacgcactgcattatcaacttgaatgtatgagttgaacaactatgtcataaataaaagcccccttttcacaatatacatttacatattgtggtaaagggggctctcattttctacgaatactaaaatggattttattttcaaatgtgtaaactagacaaacactgcctgatacacgtacaaaataatgatactaataatgattgtcaaattggtcgtcatacctataaatgtcagtgttcgatatttaaactgaataccataagaaataattgcaacacctaccgggaacatccaagtgaccaacaatgtcgtcttaatcatatcatctgatactggtaacaacacatatactaacaatcccgcaactaatgctaatccataatgcaaacataaatatttaatagtagcaggtatatactttctttccagagtaaaattcaacatgacacctagcaaaatcattgataacggcatatttgcatgggaaagtatgctaaagaaatcgattgccacatgtggtaaatggatgtgacttatattcaatataaacattacaatgtatgtaacgagtggcactgattgtaataatttcttacctaaatatttaaaatcgaattgatcactaccttcactaaagtagctacctacaaagtaagtaattccaaacatcacaaaggcaccacctatatcagccataacaaaataaataagtcccgttttaggccatatcacttcaattagtggatatgcaaacaatccaatattcatagcaccagtcatcatacctactgatccacgcatgtgattatcatattttctaaaaaaccagacagcaatcattttcgccacaataccatatataatcattaaaattggtaaaatggagaatgacaattttaattctgcactgtttaaattcacaataactaaagatgggagtgtgacattaagaactaatgtagcaatgacttgactatctgttgcttttataaaattaatgcgcttcaaaaagtaaccaagcgcaattaataaaataatcatagtaaattgttctgtcactgttatcccttctttcaataatcttcataatttataactttaacatactccacagatattttagaagtctactgtttcatgctataatctacattaaatgcacttaattatatttcaaaggagtgttatagtatgtctttagaaaaccaactagccgaacttaaatatgattatgttcgtcttcaaggtgacatagaaaaacgggaatctttgaatttagatacttccgcacttgttcgtcaacttaaagatattgaaaatgaaattagaaacgttcgtgctcaaatgcaagattaataatctatcattcaagcaataaatgctttttgttacataaatttgactagcattgctctgaatacgttatattgatgaattgcttcatttttcgctcaattacatctagaatcacaagatgttgtcgtgttatgatttagtgtttcattaacaacatacacgcatatctatcccaacactgctatttatgttttctacgctgctgtactacatgaaccctttgaaacggagaggaagttatcatatgcaattttatctgattttactagcaatactttatctaattgttagttttattagtatttttaaaatggaagttgtatttactcgcattttgagaattattatgggtgtgttgttattattcgtcttagcattaacgacgatgagttttccaaaagagaattggtgggtatttatcgtcttattactcttagtcggtaatgtcgaagtgacaggatttaaaatgcttaaaaaagatctaaaaggcgtaaacatcttgaatttaatgtcattatttatctttgtcatatatttcatcttaaccatcgtattattctaagtaataaacaaaatatgcaataacataattgcaaccttattttattatcggattacatgttgaatgccagtattgttttattaacacatcgattaaatcgcacgtgaaataaggtctaaaatttcaaattttaaaaagccataaaagtagtcaatatcatgaccgcttttatggcttttatattatctatcgtttagtgaatcgtttttttaaagtaaagagaatttcatatattactggtacaactacaagtgttaataaagttgatgaaattaaaccaccaataactgtagcagctaatcctttcgaaataagaatcgagctatcttgaccaaataacaaaggaactaatgcaccaattgttgcaatcgccgtcattaatatcggtctaattctagtaccgcctgcttcgattaatgcttctttcatctccatgccctgttgctcattattaataacacggtctattaacacaatggcatttgttactacgattccaattaacattagcataccaattaaacttggtactgatattgtttctcctgtgattaatagtgcaataattacaccgataactgtaaatggtaaagagaataaaattgtaaatggtgctaggccacctttaaatgtaataactaggattaaatatacgataatgattgcagctaacattgcaaaggctaattgtgtcattgcattgttaatatcatctgatgcaccaccgatattaacctttacattattcggtttgtccaaattatttattttagacatcacttgtcgtgttgtgccacccacatctttatttgttactttagcagataccgtcgttgcataatctccttgttcttgcgtcaatttacttggtgtcgttgttttaactaacgtagcgatatctcccaatttaatcgtaccaccagtcggctttttcaaagttatattattcaacttatcttctgaccagtctgtttgcttattttgtttgactttaacatcaacagttttaccattttctttaacagtcgtaactgttttttctggtaagttttcattcaagtgcattgcaagttgacttgcagaaataccattttctgccgctttattttgatcgactttaatttcatactgatcatatgtttgcgataaatcagatttgacattggctagtcctttaacctgtttcattttctgttcaatatcttttacagttgattttatggcatccattgatggaccttttacagtaacctctacagatttattacctgcacctgttcctaaatcttgatttttccactctccaggatgtttaaagccatctgcatgtttaataaccttatccgcttctacatcaaaattaggcgtgtcattatcatattcaaccatgattgccatactatttgtactacccgttggatctactggactactaccgccaactgagtattgaattgtttttacatgctttttctgttttaaatatttttcaacatctttcgcatgattcaacactgcttgctccgtttcaccaggcttcggtgtataagtaatagctaaaaatttatcgtcacctgctgaaataaagctagtgcctagtctcggtcctccaaatacaatagttgcaaccaaaattaatgtacttaatataattacaatccacttatgatttaatgaccaatgtaatacttttttataagttgtactaacaacacctaatccttcttgatgttgtttattacgacgtttaacgccttttttaaatagtgtagctgccaacgctggaacgagtgtaattgacactaataacgatgctaataaactaaatgcaatagccaatgcaaaaggtctaaacatttcgcctactgaacctgatacaaacacaagtggtaagaagacgataatagtaactagtgtcgatgacattattggtttaaatacttcagttgtcgcactgataattaaattttcaccttttagttgttcttctgaatctgttaagcgtcgataaatattttcaacaactacaatcgaatcgtctatcacacgtccaatcgctactgttaatgcacctaacgttagtatattcaatgaaacatcactcaatttcagagcaataagcgccataagaagtgataacggaatcgatataatagaaattgccgtcgtacgaatgtttcttaaaaacagcaaaataactataattgccacgattgtacctaatgatgctttttcaaccatcgtataaagtgatttctcaacaggctttgcagtatccattgtttttgtgacattaaaatctttattttcatcaacgaatgtatcaattttacgttgtacatctttggctacttgaactgtattggcatcttgagctttagttatttgtagattaaccgcatcctttccattcgttttagaaatagaagtacgcacatcaccaactgtaatatcagctaaatctcctagtttcgctgtcggcataccacttatattatttggtgctgacgcttttgaattttgctgtggtgatgcctgattaacgtctgacatggctgaattttgtttattgtcactttgggattgagattgcccttgtcctcctgccaacgttaatggaatatttatgtttttaaaagcatcaacagattgatattgaccatcaacaacaattgatttatctttatcaccaaattggaacaatccaagtggcgttgttcttgttgccgtttttagatagttttctacatcatcagcagtcaacccatatttttcaagttcattttgcttaaatttaagggtgatttcacggttcgtctgcccatttaattgcgcattttgcacaccatctaccgtttgcaattttggtattaattgttcattcagtactttcgttacttttttcaagtcattctctttatttgaaaatgaatatgctaaaaccggaaaagcatccatcgaattacgtcttaattctggttgaccaacttcatctttaaatttaattttatcgatttcttttttaagctgttcttctgctttatccatatctgtattattttcatattcaactgttacaattgaagcattttgtatggattgcgttttaacatttttcacatatgccaatgatcttacttgattgtcaattttactacttatttcatcttgggtactttgtggcgttgcacccggcattgttgttgtaactgaaataactggattttgtacatttggtagtaattctaatttcaatttagcactcgcatatacaccgcccaagacaactaaaacaaccattaaaaagatagcaaacttattccctaaagaaaattgtaatagcttttttatcacagtacttccccctctttcactatattcaaaaatattttactcaaccattctatattgtgtaaaaaaatctgaacgcaaatgacagtcttatgagcgttcagatttcagtcgttaatctattttcgttttaatttacgagatattttaattttagcttttgttaaacgcggtttaacttgctcaattaattggtacaatggctgattcaatacataatcaaattcaccaatcttttcacttaagtatgttccccacacttttttaaatgcccataatccataatgttctgagtctttatctggatcattatctgtaccaccgaaatcgtaagttgttgcaccatgttcacgtgcatacttcatcatcgtatactgcatatgatgatttggtaaaaaatctctaaattcattagaagacgcaccatataagtaatatgattttgagccagcaaacattaatagtgcaccagaaagataaataccttcaggatgttccttttctaaagcttctaggtctcgttttaaatcttcatttttagcaattttattttgcgcatcattaatcatattttgcgcttttttagcttgcttttcagatgttttcatcttctgctgccatttagcaatttcggcatgaagttcattcaattcttgatttactttcgctatattttcttttggatccaactttactaaaaatagttcagcatctccatcttcatgcaacgcatcataaatattttcaaagtaactaatatcacgcgttaagaagccatcgcgttccccagtgattttcattaactcagcaaatgtttttaaaccttctctatcagatcgttctactgtcgtacctcgctttaaagccaagcgcacttttgaacgatttcggcgttcaaaactatttaataactcatcatcatttttatcaattggtgtaatcatagtcatacgtggttggatgtagtcttttgataaaccttctttaaatcctttatgtttaaaaccaagcgctttcaaattttgcaaagcatctgtacctttatcaacttcaacatcaggatcgattttaattgcatacgctttctcagctttagcaatttcttttgcactgtctaacaatgcatttaacgcttctttattactataatcaacaacaaaaccacgcgaaatataacatagcgtataaggtaatttaggtacttttttaaaaagtaactgcgcaacaccctgaacttcaccgtcacgacctacagcgattcttcgcgcgtaccatccagttaatttctttgtttctgcccatttcgttaattgtaataaatctccatttgggtgggatttaacaaatgcgtcatgttcctgattagtgatatgcatcttttccatgatttatgatatctccttctatttaacaatacctttaattatacagtttgtatcttatagtgtcgattcagagcttgtgtaagatttgaactcttatttttgaaatgtccatgctccaattaatagtttagcaagttcaaatttacccattttaattgtgaatcattttatatctatgtttcgtgttaaatttaatgttatcgtacaattaatacttttcaactagttacctatacttcaatatactttcatcatctaacacgatattcatttctaaaatgaaccaacttgacttcaatgaataaatttttcctcaagcaaccacattaatgttcatatacaattacccctgttataatgtcaataatctaacaatgaggtgtttgatatgagaacaattattttaagtctatttataattatgaacatcgttgcaatcattatgacattgagtcaacctctcaccgtgaattactttagtttacgggttatacttatctttttcacatttatattatcaatctttttcattttaattaagtcatcacgattaaataatatattaacgattctttccattgtgcttgtcattattcatatgggcattctcgctcatagcacttacgtatatttatactaatggttcaaagcgataaatagcacctctgataaaaattgaatatggtgaagttgcttgtgcgtcttttatgataaccgaatgatattttgaaactttaccatcttcaattctaaaataaatatcatcattttttaaaatcaaatctgtgtaatggtcattctcttctacaatgtccatatcaaaccatttcaaccaattcgatactgtttgtgatcggtttttacttttcacaataacagtttcaattgaaaattgtttttgaaaatatttttgcaattttttagtacgcatggaatcactttcttcccattgaataaaaaatggtggcttaatttcatcatcatcctgattcattatataaagcaattgccactttaccttaccatctttatgtgtatctctttccatttgaatcggccctactacttcaacctgctcactttgtagtttatttttaactgcctctatatcatttgtacgcaaacaaatatttttaaagccttgctcatacttctcttgaacaatttgagtagcaaaagcgactccgccttctatcgtttttgccatctttttcaacttttcattattttctacatctagtagctcaatataattttcattgatataacctaatttattgaatgttccatatttatgatgatacccacctgaatgtaattttataacatctcctggaaaactaaaccgatctaactgatctatataatgaatgatgtgatcaaatttcaatatcattagtatccccctatttacatgtaattacgcttattttaacaaagtataattatttttgctcttaataattatatattgatttctaattgctcccgttttataattactattgttgtaaaaaggttagctaagctaactattttgtcttaggagatgtcactatgctatcacaagaatttttcaatagttttataacaatatatcgcccctatttaaaattagccgagccgattttagaaaaacacaatatatattatggccaatggttaatcttacgcgatatcgctaaacatcagcccactactctcattgaaatttcacatagacgtgcaattgaaaagcctactgcaagaaaaactttaaaagctctaatagaaaatgaccttataacagtagaaaacagtttagaggataaacgacaaaagtttttaactttaacacctaaagggcatgaattatatgagattgtttgtcttgatgtacaaaagctccaacaagcagtagttgccaaaacaaacatttcgcaagatcaaatgcaagaaaccataaatgtgatgaatcaaattcatgaaatattattaagggaggcacacaatgactaatcaaggctcattaaataaatcacctattttcaccaaaagttttacaattaactttttagtcaactttatcgtatacctatgcatgtatttgttacttgtagttattgctggctatagtaagcaagctttcgacgcttccgattcattagccggattagttgtaggactatttattgtcgggtctttaattggtcgatttgctacaggtaaatttgtaaatcaaatcggacctaaacgattattatttattggtttaattgctttaattatcacgcaattactttattttattgatggatctttagcttttttaatctttgtacgtctcataaacggtatcgcaactgcagttgtgacaactgcaacaggtactattgcggcatacgttacccctgttaatagaaaaagtgaaggcatcagtttattttccttaagtttagtattaggtacagcgattggcccatttctaggcatgttacttattacaaaatacgcaattgacttactgtttattatttgtgtcatattaggcatactcggactcattatctcattatttataaaagttgatttcgaagtaacaaataacaaaactgaaactaatgtcattgataaaccaagatttagtattcatcaatttattgcaaaagaggccattcctgttgctgtaattatgcttttaattggcgttacctatgcgtccatcctaacttatttacaagcatttgctttagagcgacacctagtcactgcagcaagctatttctttatttgctatgctatagcatcgttaattactagacctattgctggtagattgatggatgataaaaatgaaaatattattgtctacccagcatttatcatgcttttcctttcatttgtatgcttaatttcaagctatcaaagctggttaatattacttgctggtgcttgcctaggtttagggtatggaaatttatcatctgcaatgcaatctattgcgataaaagtctcacccccgattaaatatggtatcgcgacatctactttttacgttggtctagatgcaggtgtcggcttcggtccatcattccttgggttatttactcatatgttttcatatagtgaaatcttcggctttatggccgctttagcaatcattactatgcttgtttacttcttaattcatggacgtcatgtaactagaaatgccatgaactaaatatttatattcaaaaataaaaagcatgccaatctctattcatcatttgtctgtccccaagacgcaattatgatgtactgattggcatgctttttaagtttttagtttgtaacgcttaacacttctatttctttagtaattttatctaacaatttcttttgagaagtactatagaaatagaatacttgtctttcatccgtttcagaacgcaatttagaaataagctcttttttatagattttacggataatcacatcgattttacttgtatcccatagcatttcaaaatgtaatgtatccctcaattctttaccgctaatcttttcagcttcatacactttaaaaaggactacaaattcttcaattgaaatcttatgtgttgtttttaaccagtgctttaactgacttaactccctttctgcttctataaaacgttgaactttattactcataatatgatgcctcctatgtttcttcttagatgtttgtaattcatattattatacaattacttaaatttattatatatcaaacttagcattttatctattacaaatattaaattgctggctatatcttgtttagatttatatattttggacaacttgttgtttattcgacaacatttatacctaaaaaagatatattacaactcaatggcatggagtgtgacatcaatgttaaagaaccactaaagatttattatgtagtgattcttaagagtgggatagaaatgatattctcataaaatttatttcgttgatccccaacttgcattgtctgtagaatttcttttgaaattctctatgttggggccccgccaacttgcacattattgtatgctgacttttcgtcaccttctgtgttggggccccgttccccaacttgcattgtctgtagaatttctttttgaaattctctatgttggggccccgccaacttgcacattattgtaagctgactttctgtcagcttctgtgttggggccccgccaacttgtaaaaactttaaaaacgatcatttctattaaatctggcatagatatgaccgtttttactttaataaataatattgtattttagggagtaagacagaaatattaaaacatctctaatgatttaatatgtagtggtccctacacattaaccaccaatataattcatgtttatctttttacgttgacgattggcaactgtttgagcagttctctcatctgaatatcgatcatctcttatttgccataaagctttaaattgttcttttaattcttcgtcggtcacgccagaacgaataaacgctttaacgttaaatccatcgacagttgcaaataaacatccgtaaaacttcccatctgatgacagccttgcgcgtgtacatgtagaacaaaatgattgtgaaacacttgtaatcaaaccaaattgaacaccattatccttatggcgataatattttgctacttccccaaaatattttggttctacaggatcgatttcaaagtgctgctctatcattgtaagcatttcatctttagttacaactttactgaaatcccatccattatcattaccaacatccataaattctataaatcgaatctctatatgtttatctttaaaatattcaagcattggtatgatttgatcatcgttaatacctttttgtataacaacatttacttttacattcaaaccaatagacgtcgcgtaatcaatttgttctaaaatcgtagtcgctttaatattacgattattgattgattgaaatagcgtatcatcaatagcatccaaactgacattaattctgcgcagcccagcatcatataacttttgtccatgcttttttaataacaaaccatttgtagtcaaaccaatatcttcaataccatcgatttgatttaatttagctataagtacatctaaatcccgtcgcatcaatggttctccacctgtaatgcgtattttttttacacctaattctgcatataccttagcgattctagccatttcatcaaacgttaaaagttcatttttaggtaaaaatacgaaatcatctccaaatacctctttaggcatgcaataatcacacctaaagttacaccgatctgtcacagataaccgtaagtcacggatgggacgtcctagtttatcttttatttgttctaccatttgtggacctcctaacagcttacaatttttgaattaaagcgtccaaatcatgctgataatttatatttttgtaccaatatgagggcgcatctacatcccttacatccaaataatccgttgataattcatgatatacatttttaaaactgtaattatcagaatgtagtgctttagttatagcgcctaatgcattcggactataaaatgcaattgttggaataaaacgtccatcttctttaaaagctgcgacatctaaatgattttcaataagatgagaaactaaaaactgatacaacgtgcttacagctttaccagtaatcattggtgtatcaacagaaacgacaaaaaacaattcttcttcaggatgttgcttcatgattgtataaattcctgctaatggacctttatcattatgattctcatcatctataacaacatttggatatttaaattgcgttgccaattgcgcatttgtactaataataatttcattgaacatatttgttgattctaatgtcttaattactctactataaaaggtctcaccgttcacttccgcaaaagctttgggcttaccaaatcgcactgaatgaccacctgcaagaattattgctttcatgctcccttaacctccactaaccggtggaattaatgcaacagtatcattaggttgaatgaaatccgatttttgtacaaattcctcatttacagcaacttgaaactttttattattgatttgcggataacgttcaaacaataaatcttcaaattgttgtacagtcaatgcttgttcaagcacaatatcttcctgtgctttttgtaatatatctttaatttctgcgaagtaaagtaccttcatctctcttattcctccctcttcgcttcttcataattccctttttgatgcccttgccattttgaaccatcttcccaaatttcttttttccaaatcggaacaatttcttttatacgctcaattgcatattcatttgctcgataggcatctttacgatgcggtgaagaaaccgcaattaatacagcgatatctgaaatttgtaatggccctattctatgaacaatactcgttatcgttccaggccatttttcatttatttcatctccaatttgtgccaatttcttttcagccattggaatatacgcttcatattctaaatattccgttttgacgcctttagtccattcgcgaacatgaccggtaaaaacaactactgcaccttgatattcatttatagtgaattcacgatattgttctgtttgtatcggttctgtcacgatttcaaattgtttcattcatttcaatcctctatgttaattgtgtatcacaatcatttttaattttatttaataaccattgctcaaatgctgtaaaatcttcatgctcccttacattaatgctataacaaacattcgacaattgttgtaatacttgcaactcttcttcatttcgatagactacgactttttcaaaatcagcatttttaaagccttcaactaatacgatattggtgtcaattgtaacagatttttcaataatttgagtaagattttgattatctacacgtgttacagtttgctgatattgaaaaccttgtacaatactttgatctgcccccgcttcaaaatgcttcatgtgatcgacgtctgaatcctgtaattgaatatcttccttaccatgcccatgatgtttaatagtagcaactgtataaccatgtgactttaagaaagagacaatatgcctcatcaatgttgtcttaccagactttttgtaacctacaatttgtaaaatcataaaagaagttcctcttcagcagcgtcagattcagtcaatataatatctactgtatgccccgctttaaaaccacgtgaccctcctggtaacatgaccatacagttagcatgtgcaatcgctacaaccgcacctgatttattgaatcctgaaggtactacagtagctccagcacttgttaacgttgctttagcacgtataaatcgtgtgaatgggtttgccttggtaaaatcttccattaatgttgctttaattatttgcgggaagacttctagtgcgccacacatatgtttaacagctggtttcacaaatagttcaaatcctgtaaaacaagctgatggatttccagataatccaaacaaatactttccatctacaaatgcaaccgttgttacgctaccaggacgcattgctactttattaaataacacttccgcctttacagccttataaatctcaggtaaatagtcaaaatctccaacagaaactccgcccgttgtaataacgatatcatgtttttccatagcttctttaacgacttggatgccactatctaaatcatctttttgtgttttgtaaataccaacttcaagacctaatttttctgctaaggcacgaatcattgggccattagagttacgaatttttccatcttctaatacatcattaacatctaataattcgcttcctgttgcaataacagcgacactcggttgcttaataactttaacctctgcatagccatatgttgcaaggaccgcgatagcccctggattaattacttgtcctttttttagaacaacatcgcctgtctttgtttcttcaccttttaaagatatattttcattttttgaaaatggtttacgaattgtaaatgtatcttctagttcaatcgtttgttcaaacataacaacagcatctgcgccattaggtatttgtgctccagtcataatacgcaccgcttcgtgatccccaactaatttatcagaaactgaacctgcaccaatatgatcaatcactttaaactcaatgcgattctgaccacttgccccttgtgaatcaacactgcgaattgcaaaaccatcataaggtgatttatcaaaccttggtatatcataagtagctacaatatcttctgctaagatatgatttagacttttttcaagtgctaccgtaattgccggcattgaactctgctgattaacgatacgttgaattgcttctttaactgggattgggtttcttttttctactaccattaaaaatcatctccaaaacttttattttttcatgatatactagatgcactaggaggggtaaaatgactgagtttactcatattaatcaacaaggccacgccaaaatggtcgatgtatcagacaaacaaattacaaaaagaactgctgtcgctcattcaagcattactgtaaatgaaactatttttaagcagatttctaataacaccaataccaaaggcaatgtattgaacactgctcaaatcgctggtattatggctgccaaaaatacatcaacacttattccgatgtgccatccattaccattgactggcatagatgttcacttcagctgggatgaaacaaatgcacccctttatactttaaacattcaaacaactgtctctacaactggcaaaaccggtgttgaaatggaagctttaaccgctgcatcagcaacggctttaaccatttacgacatgacgaaagcagttgataaaggtatgattattggcgaaacctaccttgaaagcaagtctggcggtaaatctggagattttcaacgccaatcaaatcaataaattattttgtaagctcatgaatcagatgatttaattctggtttaatgagcttttctaatgctaatttaactgcgcctgttgatcctggaatcgaaaatatcaatttattattaactgtacctgctacagcacgagacaataatgcacgcgtgccaacatcttcaacataactcaaatatctaaacaattccccaaagccatctatctctttagttaaaagtggttttactgcttcaatcgtcacatcacgttgtgcaatacctgttccaccagtcgtaatgatgacatcaatatcttcttctaaccacttcttcacctgcgtcgtgatggctactttttcatctttcacaattgtataatgtgcgtcactcacttcaacgtcatctgcttgtaatagttggcgcacgcattgaccacctttatctgtatcaaagtctctagtatctgataccgttagtacggctgctttaactgtacgattcaatttaacgttttgatgttcgcccataatattacactccttttgtcttatctttttttatccaaacaataaattcattagatgtgtggcatctgatgtgcgtgtcatgccatgtattaaaaaccttccacctttaaaagcaacaatgcggtgtcctttaaattcaaacataaccatatacgaattactgcgataatttaactgatgttgttttaaaaattgaacaagaatgtcgtgtgtaattgatgcattttcatactgtacagtgtctctaccacacaatgttgcataacgttgttcattcttgtttaaatacggataacttggtacatctccacaagttgtacagtctgaacgttgcattttactgaaaccaaatgaataatgactaccttcccaaatatcgccataagttatttttgtgtcaattggttgttccgttaatactttcatcgcatctcttaattgtaaacttgttgccatcgtcacggcaggttgaatgacccctactgtatcacatgttaaatttaatgctggcaattgtggtaccaaacagttaaagcaaggtgttttaccaggtataaatgcagcttctgtatatgtactctgtacaacaccaccataaatccaaggtatacgatatttatatgcaaaatcattaatcagttgtcgtgtttcaaagttatcggttgcatcaataataacgtcaacgtcctgtccatgtgtttccaaaaaataataatccacatgggcaatataatcatcaatatcaacatcactacgtaacgctagcaaatgctttttagctgcaaccaccttaggcatcattttcaaagcatcttcttcagtaaacaatgtttgtctttgtaaattactaaattcaatataatctctatcaacaatgattagtttggcaatgcctgctctaacaagtccttcggccacatgtgtacctaatgcgcccataccaataatcaacgcacatttttgatttattttgctttgacctatttcacctatttgtttaaataaaatttgccttgaataacgttcttgactcacattaagttatcctttctttttatcattactttcattatatgacgcgcgtcaatgtctctcaaaaaaactgcccctaaaaaagagtttaaaacatcattaaaatgctgatagaagcattcacttctacaattttaaatacgttctaaactctttaatggcaaataaatgattacccaattgtaataatttcatgagccatttgttctgcttcatagtttgaatgtgtcacaaatatgattggtatttgccattcgttgaaaatacgtttaactaatgtaatactctcatcttttgtagtatcatccaaactagaaaaaggttcatctaataaaattaaatctggtttcgtgctaagtgcacgtgcaagtgctacacgttgtgcctctccacctgacaatgtcataggatattgtttcatcaaatgatcaatgtttaaagtttgaattaattgatcgatgtgttcagatggttcagccataaaagtaatatttttatagaccgtcatattaggaaacaattggtagtcttgaaacagatatccaatacgtcgttgttgaattttaacattcacgttttttgccgtatcagtaagtaattgcccattcacttcgataatagcttcatctgctttacgtaatccggcaatcatatttaaaacagtagttttaccaatgccagatggaccacgaactgcataaatttttggttcagtatcatctatattgatgcgaattaaagtgttctttaattgatatttcacattgattttaagcatctagtcgacctccttatatttatctttattcaataaattaattgtagatataaccacaatagagaatgcgactagcactaatacccataaccacgcttcattttctctaccttgttccactaagaagtatatttctaaaggtagtgtattcgttttatttggaatatatcctgcaaccattaatgtagcaccaaactcacctaatgcacgagcaaaactcatcattatacctgctaaaatagagcgtttagctaatggtaaaattaatttgaggaaaattttcgtttcacttgctcccatcgttctagctgtattaatcattttcgtgtctatacctctgaagccttgcacagtatgttgatacattagtggaaaactaacaatgacagatgctatcacagcacctgtcaaagtgaacactacaggtaaatgtagtacattcgcaaagaattgaccgattggtcctcttggcgagaagatgattaatagaataaaacctaataccgttggcggcaaaacaataggtaatatcaataaactttccaataatttaacccacgaacccttacgacgatacaaccatttagatataaaaatacctaaaaccgttacaataatcgtactgattacagcaactcgtattgatatccaaaaaggtgttaagtcaggcatggattacaactccttatgctgcaaagtggtattcttttagtatttctttagctttatctgattttaagaattccatccactcttttgctaatttactatctgatgtagcaccagcttcgtatgtgattggcttcttaagttctacttctttaattacttttacagtatcaatttttttattttgtttatataagtcagttttatacacaaaaccttgtttcgcattacccttttcaacataatttaatacttgttttacatctttagcataaacgattttactttcgacttctttaaataagttattgttatctaaatactgtttcgcatattttcctgctggtacagttttcacttcacctaatgctaatttatcattgtcttttaagtcttttactgaagtgtaatttgaatctttatcaccaattaatactagactatttttcgcatatttatatgtatcatgcgctttattcttgtcttttaatgcatctacatctttagtatttgcagacataaatacgtcaacaggtgcgcctgattcaatttgttttcttaatgcccctgatccaccatagttaaatttaatatcagcatttttatgctcttttttaaattctgaagctaatttcttggttacatctgttaaacttgctgccgctgcaacttgaatctcttgtttcttaccattgtctgcgtcatcttttttactttcattattatcgttagaattagagcaaccagctaatactaaaagcattgcaatcacaacagcaaataaacgtttcaatttcattgagtgaacccccatttttaataatatttacattttcattatacacttactattatatttgaaaagaaccgttgcctgtttatatattgattcaaacaattgtcaaatttgcataagattgatatttattaattgatgccctagtatgtatattctcgaattcaatttaaatcaaacagattgctcgctattaatttttatcaatcaaatttcaaacttaagcaaatatgttaaaattttaagcaaattgctttaaaataaagtttaagctaattaaaggggttagataatgaacaaagatgtatctttaggtcaaccaattgttagatatgaagatggaaaattattcaatacaacagatcaatatgtgacagaatttccacttacaattatggtgaatggtgaagaatttgcgactgttatatgcagtccaacaaaccttgaggagttagtcattggatttctggcttcggaaggtgccattttaaagcgagatgaattaaaatctgtactgattgatgatagtaaaggttttgcccatgttgaacttaataaagatttaggcgatcgctttcaatattccacaaaacgaatgattgcatcttgttgcggaaagagtcgtgagttttattttcaaaatgatgctgctatcgctaaaacatctatgtctaaaatcactttaactccaatgcaaattattaacatgatgactcgattacaaagtgcaagtcatatttaccaagaaacaggtggcttacataatgctgctataagcgatggtttgacattttttgtacatcgacaagacattggtagacataacgctctagataaattatatggattttgtattcagcgacatattactgtccgagataaagtattaatttttagtggacgtatttcatcagaaattttaattaaagccgcaaaaattggtgttggcgtcattttatctaaatcagctccgacaacgcttgctgtaaccttagctaatgacctaaatattacggcagttggatttattcgaaatggtggctttaatatatacagtcatccagaacgtatcattgattctgaacaataacatattcattatagtgtgtcataatgaacgatattctacatgaatcaacaatttaaacgcactatttttataagtataagtagctcaaaacaatttaaaaagcagtaagttgatttctactcgaaaccagcttactgcttttttattctaatacaaacctatcatcaatcgttaatttccaatatcttcttttaatatttgataacaaaacgattgatagacataaccttgctttgcatacatatcttttgctgtatcttcaccatctgcaactaatatgattggtttgtgattttttgatatggcgtattcacctatcaacgattgaattgtagatccaattccttggtgccgaaattgttctaatacaccaaatccatctaattcaatgtaattttcactttcaatgacatctacaacgccaataggttcattatttaaataagctactaagcgtttaatcacatctttttgataatgttcccttaccatttcttcatgtgcatctgcatagtcttttccaaatggcaaactaaactgatatgcaacttttaaataggcatctatatgcgactcgtcaacgatggcaatttcaacgtcagagttacgcggcaaattggcaagcgcatcactttctatggcatacaattccataatacctagttcaaaattcatatctttaaacatagccatccaatgattatcaagttgttcattttccgggaaactaaacgcataatgatttgaaccttgatttgtatgtaattgatgttgacgttctaagtctttcagccatcgctcttgggtaggcgtctttttatatatccatgtgttacttgtgtatcgttgtggaaaagaaggcgttaaataaatcaactgctcgtcgtcattttcaaatatagtgccgttacaatatatatctgacatacttatactagccattgacacctactcctttcacttttataaatttcaaagcaacttattcaattactttactatcttaaatatgattattttattcccataatttgacgaaactgcgagtgattaagtaaagctgtaccaatcaaacttgctacaattgcttttaatatatcaccaggcaaataagctaatgaaattgaaatagctttcgtaaatggtatgttaataatcatgcccataatcaatgtaccaataacatctaatgctataacaccaaaaactaaaataccaacgaataaaatccagaaattaatttcattgatgaatctatctcgaatcgccccaatcatgaatgctacaactggatataatagtaaaaaccctgctgaaggacctgcgaatacaccgatgccaccgcgaccacctgataacaatggcaagccagcaactactaataataaaaagacgataacacttaatgtgccatatttacgtcctaaaatcacacctgctaagaaaataccaatgttttgaagtacaattggtactgaagaaaatggtagtggaattaccggtaccaatcctaaaatagcgataatcgctgtcattaaagctgtatatactaactgttttgttgtcattttttacttcctttcgtatttcatgaccattattatagcaccattgtaaactttaagaaatgaaaagtttacaataagttgttctatataaattaaaaccttaattattctacacagctgttaatttacttttttagcaagtgcagttatataatcaaaaaatgcgttgttatctacatgatttatgacattaattttgcgcccatctttacactcaaatgtcttaccttgacttggtccataacttattacatcgacttttttctcaattgaatgaaccaagtccttgttaccaatataagcagtcgttaaaacatcccataaaaagtaagtagaatttgttataaagtgtgttaatggtggtaccgctgcataacttactcctaaaaaatcaatgcccgtatattggcgttcattcgcccatctttgtctaacatctaacgttagcggtacttgattcgtactttctaaagcaaccatatcaatctctatatcgctatcaaaaacaattttaaccgcttctggatcccaatatgcattccattctgcagaaccatcatgctcaggttcttcaacatttccttttggtaaaaaggtgccacccatccaaactaatttttctatatactgaacgatagatgaatctttttgtagtgcttttgctaaatctgtaagcgggcctgtaaataataatgttactttttctgattgtctctttaaagtttgaataatgtcttcaaaggcttctttgtcgctcacatttgaagcaacatgtttgactggctcatttaaaattggcaatgcgtccataaaaaaggcatgcatacgccattctttaggaaatggattttttcctcgttcatatgatggcgcaacttgaatatcttcatttgaaaaacgattaataatttttactgatgcgctcaaagatggctctaaataacaatcagcaccaattgtactgacccctatcaattgaacgttttccatttgtaataataaaaatagagatactaaatcatctacaccaccatcgtggttaaaataaactttcttagtcactcgaaatcccccttacatttcattttccattaacaatattatgtttttataaaacgttgttatatatctttctacaaaatcataacattctgttgtaatccttttaaacctcttctttaattgaaagccattccctgatatcccttccataaagtatgcactaaaataattatgatataacttattaataaagagatacattgagctattttctcaggtatactactttagctataataatactaatctatcattaattaaattgaacgataacaacggcacttattatttaaaaaaatacaaatatctaactttctagctataaaaataagagcctaatacaatatcaaaagattgatatgtttcagactctcatttcactaacttatatagctgaattattttgcagctttaattaatttttcttttaaatctttacgcatgaaatctaatgtataaggatcgttgtaccagtatgtaccagcatcaactttaacaatatgtccttctttagtagctttcaaattcttccacatgtttgttgattcgtatcctggtgtaggtttaccttcacttgtactcacaatgtaatcaccagcatatttttcaatttcttcttgtttcacttcagcccaacctgcttttgcagttaacttttgttgttctggttgcattttcaaaccaaatgcttgatataatacttctccaccacgaccccagttatcgccgtaagtgtataattttttatcaaattcatcaaacaatgacactgttgcatcttgtccaattgcttttttaatttctttaccgtctttagcagttgtttcttcccaatctttcttccaagcttttactttatcttctttaccaacaattttccctaacatttcttgttgttctaaatatttatgcttattatagtcaacaactactgttggtgctactttttgatattttttaatatctttgtcagtagagtatacaataattaaatctggcttttctttagcaactttttctacatcgccatcaccaatttttgtaacacctttaaatttatcttttaatactttgctttgatcgacttgttgatttacagctacaatgtttgcacctaattttttaagtccaccagcatatgttggcgcaactactgcaatgcgtttagggtctttcggaatatctaccgttttgccatcgtccattttataagatttagtttcagctttgttatttttttcaccttggttcccacacgcagctaacactaataacataattattaatggtaataatagttttttcataatttcctcctattgaaaatgattatcaatcattcaaaaattatacaagattgcatatacatttacaatagctagtgttatttattttttattttcgcaaaaaatttaacaaaatatcttaacatccctataaatccccacaaaaaaagggtaaatccgaacgtcaaatttcatctctttatgccaatcaacgatcgatttaccttttaaaatttaaaatgtatctgtaatactcttagcaatatttgtatatgctgcatcttccataggtggattgtgtaatcctgcacgcatgtcacgatagtaacgttgtaatggtcgattcatttctaagcttttagcaccaactattctcatcgctaaatcaatcacttcaagcccttgattcattaccatcactttactcgcacttgttggatttcttatctgactgtcatctttatattgttgatacccttttgctgtactccataaaaattgtctcgcacataacaatagcgtttccattttccctaaattttgttgcacagttggcaatgttgcaatcgttccttcaatactattagggctatgttggattgcaaagtctacagcataatttctagcagcttgtgctatacctaaataacagcttggtatatgcaatatccaaccatttggcgctttacttttctctgtttccactaaatgttttaatggtacttttacatcatttaatattaaatcatgactttctgtcgctcgcatacctaatacgtcccaattatcggcaatttcaacaccaggcaaattcctgtctactaagaaaaaaccaacactttctaattcttctatataagcagcaacaataatatgtgttagtgctttactcattgatgtatatgtcttcacaccatttaaaatatacccatcatcagctttaacagcatgtgtacttggtcttccccctcttgttggactacccatttcagcttcactaactgctctattaactaatgcaccattattaatttcaacagcaaattgctccaacatatcttgagaccataatttctgttcataaatttgtcctacgacactcacatgccaaccaatagataatgctgtggcaccatcaagttcgcctaaaaatgattgcaaaataaccatgtcttctatggtcgcaccttcaccaccatatgcttttggtaacgttaattttccataaccttctttaattaaccattcaatatttttatatggaaattggctatgttgatcattatattcagctttagccttaaatgtatctctaattactttgaatttttcaatccattttctttgaatttccgttgttattaaaaaggaattatccatatcattcatattagtcaccccacacaacacacaatataaattatttattcctagtttaacactcgactttaaaaataaaaaggaacgtgctgtgaacaattaaaagaaaactgataattcgattaagtatgcacttaattttatccataaaaatacaccttaaactatacaattcgctgtatagtttaaggtgatattcaaacaatattaggtttgatttaactatcaagcatctactttgtcatgtttaataccagcaaataataaaatccatgtcacgataataaatggcaatgttaatgcaggtaagccaaacggttcaagcaatgttgttgtacctagttgcaccactactgttaataacacacctaaaaaagtcgaaatataagggttaatcgctgttttaaatgtatatcctagtgcgattgccattaatacaaagttataaccgaataatccctgattaatatcatcataattaccacctaatagagctacaatgataaagcttaacaaactagctataacagctaagagtgttgcttttcttgatgctatcaatatgccgattaaaatacatacgccaccaattacactcgcttcgataaatacttgactgaatccttcaaataatgactgaatgaaatgtattctatcattgttgctaaaattaaccgtttcaatgttttgaggcattaactttaacgatgtatctacaaatttaacctgtcctgaaagtaaaattgtaaaccaagtcacaatgacaaaaggcatcgtcagcatcggaactttatatggtcttaaaacttctctcactgcagcagcaactggtaacgttaataaagttgctatcattgttataacaatatctaatcctgacttatctaaaaagattgttaacgcaatggcagttagcactggattaaatccagctaacccatcattaatctctgcctcactataatttataaaacgcgcaaaagtataggcgatgatgctacctacaatagccgctaatccaattgtccaatcggctacaaataatcctattaagataaataatcctgtccatttattactaattaacacaacctgagatatatttttcaaaagcacatctattatcttcaaatctttcacctttcctttgaatcattactcattaatatactactattctatgaaaagttatattaaaaactattttggtttttacataaatatattccactatttgttttcgattagattgtttgcttcaatatcggatatgctaaaaatataattttctaattacacattgaactttgtatattacttgtttatcacaacaattaggattaatataaattttgtaaattgtatctaatatgaaattgggggttttaatttgcattttacacaacgagagcaagacaaattaatgattgtagtggcggcggaagttgcacgtcgtcgtaaagcacgtggtttgaaactaaatcatcctgaggcattagctttaatcagcgatgaattattagaaggtgcacgcgatggtaagaccgttgcagagttaatgagttatggtagacaaattctaaacaaagaagatgtcatggatggtgtcgaacacatgattacagatatcgaaatcgaggctacgttccccgatggtactaagttaatcacagtacatcaccctattgtttaaaggaggcagtcaaatgataccaggagaaattattacaaaaagtacagaggttgaaattaataaccatcatcctgaaacagttatcgaagttgaaaatacaggagatcgaccaattcaagtgggctcacattttcatttttatgaagcaaatgcagcattagatttcgaacgtgaaatggcatatggaaaacatttagatattccagctggagcagctgttcgatttgaacctggggataaaaaagaagttcaattagttgaatatgctggcaaacgtaaaatttttggttttcgtggtatggtcaatggtcctatcgatgagtcacgtgtctatcgcccaactgatgaaaatgatgaatatgcaggtgtattcggagataacggtgctgaaaacgtgaataaaaaaggaggaaaaagatcatgagctttaaaatgacgcaaaatcaatatacgagcttatacggtccaactgttggagattccattcgtttaggtgatacgaatctatttgctcaaatagaaaaagactatgcggtttatggtgaagaagctacttttggtggtggtaaatctattagagacggtatggcgcaaaatcctcgtgtaacacgtgatgacgtgaacgttgcagaccttgtcatttctaatgccgttattatcgattacgataaagtggttaaagctgatataggcattaaaaatggttatattttcgccataggtaatgccggcaacccagatataatggataatgtcgacattattataggttcaacaacagatatcattgccgctgaaggtaaaatcgtcactgctggtggtattgatactcatgttcattttattaatcctgaacaagcagaggtcgcattagaaagtggtattacgactcatattggtggtggtactggtgcttcagaaggttctaaagcaacaactgtaactccaggtccatggcatattcatagaatgttagaagctgccgaaggtttaccgattaatgtcggttttacaggtaaaggacaagcaacaaatccaactgcactcattgaacaaatcaatgccggagcaattggattaaaagtacatgaagactggggtgcaacaccatctgctttgagtcatgcattagatgttgctgatgaatttgatgttcaaattgcattacatgcagatactttaaatgaagcaggatttatggaagacacaatggctgctgttaaagaccgtgtacttcatatgtaccatactgaaggtgctggtggcggtcatgcgcctgatttaattaaatccgctgcattttcaaatattttaccttcatctacaaatccaactttgccttatacacataatactgtagatgaacatttagatatggtaatgattactcaccatttaaatgcggctattcctgaagatatcgcattcgcagattcacgtattcgtaaagaaacgattgcagcagaagatgttctgcaagatatgggtgtattcagtatgattagttccgattcacaagcaatgggccgtgtaggtgaagtaattacacgaacatggcaagtagcacatcgcatgaaagaacaacgtggtcctttagatggtgattttgaacataatgataataatcgcatcaaacgttatatcgctaaatatacaattaacccagcaattacacatggtatttctgaatatgtaggatctatcgagccgggcaaactagctgacattgtcttatgggacccaattttctttggggttaaacctgaattagttgtaaagggcggattaattaactctgccgtaaatggcgatgcaaatggttctatacctacatctgaaccgatgaagtaccgtaaaatgtatggtcaatacggcggaaaccttacaagtacgtcaatgacattcgtgtctaaaactgcttatgaaaatggtatcaatcgtgcattaaatttaaaacgcatggtgcgtccagttaaaaatattagacaattatctaaagcagatatgaaaaataacagtgcaacacctaaattagacgttgatccacaaacatatgaagtatatgtagatggagaaaaaattacaagtaatgcagcaactgagttaccattaactcaaagatacttcttattctaggaggaacatagaatgattgttgaagaaatccaaggcaatattgccaatttgtcaaattcagaaaaacaaaagcacgtcgaaaaagtataccttgaaaattcagatcttgttaaacgtattcaaagagtcgttacagaccatggcactgaaataggcattcgtttaaaacaacctattgacttacaatatggagatattttatacgcagatgaccataatatgattattgtggatgttaattcagaagatcttttagtgattcaaccaagaacattgcaagaaatgggagatatagcccatcaattaggaaatcgtcatttgccagcacaatttacagagactgaaatgctagtacaatatgattatttagttgaagatttattaaaaagtttaggcatcccatatgttcgagaagaccgtaaagttaataaggctttcagacatatagggcattctcatgattgatcatacacacttaagattatttcagttctgtgattcacagtttccaacaggtgctttcagtcattcatttggtcttgaaacatatattcaacgaaatataattcatgacgatcatacttttattgcttggttaaaaatgtttttacaagagcaacttacctattctgatggtttagccatgcgtttagtttatgatgcattggaaaatgatgatacacaaaaagtattacacatagataaactgatgtttgttcaaaacttacctaaagaaacacgtgttggtgcaaaacaaatggggactcgcatggttaaattggctttagaactttataatagcccatggattgcttggtatcatcaacaaatgcaagataagaaagcaaagttaaatccagctatttgttttactatgctaggccatcatttaggtgtagatattgaaacgattattgattactatttatatcaaaatgtttcaagtttaactcaaaatgctgttcgtgctattccacttggacaaactgctggtcaaaagatagttactcacatgattccttatatagaaggaacaagaaagcagattttcgaattaaaagaagcagattttggcatgacagcgcctggtttagaactaaatcaaatggcgcatgagaacgtcaatgttagaattttcatatcataggaggttataattgtggcaaatccgattaaaattggtattggtggtcctgtaggtgcaggtaaaacacaattaattgaaaaagttgtaaaacgtctttcaaaagaaatgagtatcggcgttattacaaatgatatatatacaaaagaagacgaaaagatattagtaaattcaggagttctacctgaaagtcgtatcattggtgttgaaactggtggatgtcctcatactgcgattcgtgaagatgcatctatgaactttgcagcaatagacgaattattagaacgtcatgacgatatagaactaattttcatagaatctggtggcgataacttagcagcaacatttagtccagaacttgttgacttttcaatatatattatcgatgttgctcaaggtgaaaagattccacgtaaaggtggtcaaggtatgattaagtcagatttctttgtaattaacaaaactgatttagctccctatgtaggtgcatcattagaacaaatggctgaagatactaaagtatttcgtggtaaacgtccatttacttttactaacttaaaaaccgacgaaggtttggatgaagttatcgattggattgaacgcgacactttactcaaaggattatcataatggatgaacaacaatggactgggcaacttgatttaacagtgtttttcgatggcaatcgatcagtatcaagagatattttctttgaaaaagcacttaaagtgatacgtccagtttatctaaatcaatctaccattcctacattttatatagtaaatgtaggtggtggctatttagatggagatcgttaccgtatgaatgtgaatgtcgaagataacgctaaagtgacattgacatctcaaggtgcaacaaaaatatacaagacaccttccaatcatgttgagcagtatcaaacttttaatttgaaagataacgcatatttagaatatgtcgctgatccaatcatcgcatatgaaaatgctaaattttatcaacacaatacgttcaatctcaataattctagttcattattttatactgatattttaactcctggttattcaaaaactggcgaagccttcaagtatcaatatatgcatttaataaatgaaatttatattgaagatgagttagtcacatatgataatttattattgaatcctaataaacaatcgatcaatgaaataggttatatggaacattactctcattatggctctgcttacttcatacacgaagatgttaaccaaaaactaatcgattcagtttatgaaaccattagttcttatagcaatacattcgattgtcgtgttgctatttctcaattgcctacacatggttttgcagttagaatttttgcttatcgcacacaaattatagagaaaatacttggaaccatccaaagctatatcgcagaaaatatttatgatcgtaaacttgattttctaagaaaatattaaaataaaaagactagtgtaccttgtttcaagcttaataagctgaaataaggtatggctagtctttaactttaattaaagcatcttcaatatttaaattttaagttaattttatgtcccaatgctgaataaataacttcgttttaataaattgttatcgttcaatgttattaaacgcaattaaccttgatttaatttttaatgtattcttctaattctgaaatcagtttttgaatatttgctttttgtgtatctgtaacataaacaataactgttctttcgtcttgtaaacttcttttctttgataacaattttaaatcttttagcttttgtaaagctttagttaaatagtaaggtttgaactctgagcacttagcaatctctttagatgagatttcgttagactcacttcttaaaatatgatttaaaatataaatttcttcatagttcaaattgaacttcttttttgtatctctgaaaaacttcttaacttgaaatgttgcgttgactaaatcattaatgtcattaattttactcattattaaaccactcctctgatgcacatcttgttgtagcaaggttcacatgtaatttattaaatcgaaactctatccaactatgttataaagttcattctaaacaaataagtataaaaattcaatatttttattactagaatatggttaaatacatttatttcttataataatttgatgtttaagatattttgccaaattgaaaattattagtctgaatattttgtatcttaactgatatgtaaacttttaaaattttaatctatatcaacgtgtttgatttgatattttttatattaattggatggcttgctcacaaaatttataaaatataaaaaaagaagagctttaaatcataacgcatgccatttatctttaaatgcaatgagttatcattcaaactcttcttatcaacctacatacattgacattatactatcatatgttgttttacatattcaacaaacatttcaacgttagcacttttaatatcatgcattgggacattaccaatattaaatttgaacattatagtttgaccatcataatctatcttctctatttcattataactaatacttctataataaaattggccattcatatctacattcataattaatctttcatttgttgctataaatgccccttcaaattcattctcaccttgaacttgatactcaattattcctagcactgacggaccctttttttcagttggaaataaatcatttggattcacattatctaaaatcataatatccctcccacttaaaactataaactattcttcataggtatatgaaatacaagtgattaactatttattattaagattaacttgtattcccttttcaagataattataacatgcttgaataagcatagtgactttagaaaacttttctcgcttgattgttacaataacacgcctttcatctaattcacatctctcttttttaactaatcccttcaaaattaaacactttaaaatcgggctaaccgcaaatatcgggtgatggaattcaccctgtaattctttaaccgtcaattgacctttatgcagatttaatattcctaaaacgtataactcttctaatgataattgacacatatttaaataacactttagattccgcaataattcttgtgacgacaataaatacgatacatagtcacaactaaaatcaaatgtatattgaccaaaataacgttcaatatagtcactaagctcattattcatatattctattttatctatatgcattttattaatcgaaatagtcaatttacgttgatccctttgatctcttcctttcaatagccattgatgattgtttaaataacttaacatttgaagaagggccatcttagattggatttctttcatttttaataaactatctattgaagcgctattggaatcagaattatcatatttaactaatagatttaatagtttcacttgagtcaaagtgagatgaaatgaatatttcaacatatcattaatgactttcaacattagtatgtgtgcagttaaacgcttaactttaaatttagacatctttaaaacctctcttaaaccatgcctatatctcaagatgatatttcaaatgaacaatactattgcttgagaccattaatgaatgatcataaatatttctttctataaaattagctttccaataactgtgttgttgcataatatcattcacaagtacaccattttcggaagtatgattatctttatctatacttaaaacaatttgtttagttttagcatggctaaattgttgaagacccttacacgataaacgtatagcgtctgaattctcatttaacaatgcggctggcaaacaaatgacacattgtacttcatgtttgaacttcgttacaatcatcgtgtcattttgataaataacaatccctcgtaattgattaagtatatttatgataaaaatgaatattgataatctagttaaatttatttctttgctcgattcacttataattgacatgtgcataataagtcctcgaaattttgtataatttgtcaaaagttcagaaaccttattaatatcagacattgtgattttttcttttaagtcattattctcattaatcaaatctacatcacatataattttagaacgtgcaatagacacctgttctatttgtcttagcggtaagataaaatagtctattagatgatcaatttctttatcatagcgcgtattcaactcttttggttccagatgatatattaattcaaatactcctatataattatctattaaacgtttcagtttttgaattgcagtagtatttaagtcgttaattaaaaatgcaatcttacatctattactctcaaaagtcatattaaaaattgtagctactagcttttctatcttgcctctttcagcactcgttaacaattccttatattcatgtttaatacgaaacactacatttacattgtaattcactatcttttgaagtaataaagtgatttgttcaatcgatagctcattgcttgtgtcgattgtaacaattatatgcaagttttcaggattaacacctaatctttgaatgatttgtttaatagtataataatccatccaataaaaattacttcctttaatataaatgtttttaggttgatacatttgactcctttttgtaggctcaaaaggtatatcaatctcgcgcatacttgaagaactttgattagtatcatcaaataattcaattatatttttatcaatttcaactaattgggaatggttaattgaatgagatgttggactatatctttttctaattaatttaggagtgttaccatacgtttctttaaagaggtgtataaaacgagaataatgattaaaaccatgactacttgcgatttcttcaataggcttcttagaagttaaaatatcaattaagcaatgctccagtctaatatgatttaaatattgaataaaattactataaggtgtcgctttaaacatgtcacttaaagctttgtttgtaatactaacttgattaatgacatctttcctatttatctttttatggtggttgtttgttaaataatcgtgcacttcttcggctactaaatgacgactaccatcgtatgtatttaatgacattaattcaacacacatgtaattaataatcttatcattagcattataagactgttgtttaattttgctgtagattaaatacttaatcaagattctaaaagtgctagcaacctcatttgttaatatcttgccacgcatcatatagtttgcattcataaacttcaaaaatgtctttgcacttacttcaacaacacaacatacactatcatcattaccatcaatttgatacaaatcattcaacataataatggtgacataatttctttttagatcatattgttgtagattgattgaaactacacctgtaccttgtaaccaatatataatttttaagttcgcttccttcacactactcattttcatacttttataaatatgtagtgaataattatctgtcatcttacatcctcacatatacaaatatattgatttactcctgtttgtctttctcaaatcaattgtcaacatctaatattcactaccaattatatcgccacatgttttttagcagtaacaaaacataaatcgattatatcaaataatacttttattaaaacatttttttatgctaaattaggatattttatccattaaatatacattttcatccaaataccaaagctttcataatcatagaaacttgatcgttcgtgtcgaatttttatgcattttctgattaaaagtcctatattatgcacaaaatatacatttagaattttcagtaatattacaaatttgtaacagacttattttcgaaacattcagttttcacaaagaatgccgtagttataagttttgcaaaatgcaaatttctatacttttaaaattctattgtgtcaagatattagcaaaaaattacaaaacgttaacaaagcacacaaggacgctaatttctgttatagtctttcttgtcgtttaattacgagagataacttataacattaattttgtcacacggacattacgaaaatattttagatttaaaatttttaggaggatatttttaaaatgaagaaaatcgctacagctactatcgcaactgcaggattcgctacaatcgcaattgcatcaggaaatcaagctcatgcttctgagcaagataactacggttataatccaaacgacccaacatcatatagctatacttacactattgatgcacaaggtaactaccattacacatggaaaggtaactggcatccaagtcaattaaaccaagataatggctactacagctattactactacaatggttacaataactataacaattacaacaacggttatagctacaataactacagccgttacaacaactactcaaataataatcaatcatataactacaataactataatagttacaacacaaacagctaccgtactggtggtttaggtgcaagctacagcacttcaagcaacaatgttcaagtaactacaactatggctccatcatcaaatggccgttcaatctcaagtggttatacttcaggacgtaacttatacacttctggtcaatgtacatactacgtatttgatcgtgtaggtggtaaaatcggttcaacttggggcaatgcaagtaactgggctaacgcagctgcaagagctggttacacagtgaacaatacaccaaaagctggtgcaattatgcaaacaactcaaggtgcatacggtcacgttgcatacgttgaaagtgttaacagcaatggttcagtaagagtttcagaaatgaactatggttatggcccaggtgttgtaacttcacgtacaatctcagctagccaagctgctggttataacttcattcactaattagtgatggctatgtttacgccaacaaggtttcaagagccttgttggcttttttaatttctatgaaaaaaatcgaattggtaaaaatctcaaaatttcgattttcaccaatccgattcactctgtaataaagaataaacaacatacagccattgacacacccaaatttaggcatgtcaaatcggctatacattgataaatttttagttaaagtacttacaaatatacttgccttcaaattctcaattaatttagtcattacaaatcatgacataaaacttacattacatatatcaacatgttccgctacaaaacatattcagtatatgtatagaggatatttattctaagttaaaaccttttcaaattataaccgctacaattataaatgattaaagtgtttcaacatattatatatattccacgctcacattaagttaaacgtgaattcgatgactttttaatacctatccctgtaaaaccatagataattgctataattgcgcataaataacatggtactgtccatatgaaaaattcttcaacagagacatgaagttgattcgtatagtaaatacctgatgttccccatggtattaaaggtaagaccatcgtacttgagtcttcaagtgttcttgataaaacggaacgagagacttggtatttttcgaacaaatctttcattaacacaccgaccataataattacaatcgaagcaacacctgcagcgaatacaagcgcaatacaacaaataacagtaatacatattaaacttcctacagaatggatgcctttagaaatagtagttaataagacttctaaacatcctgctttttctacaatacctgcaaatgcatatccgcaaaatatcgttactaatatttgggtcatactcatcataccaccctgttctaacaagcttttcacactggatgaaatatgagactgatgtatcattgattcgttaaaaccactaaatgttgctttgaaaccatctgtcattttgaaatgatgattaaaagtccccactataatggcagaaaagcttgatattagcatagctggcactgtagccattttaaatagcaaacaaacaatgatcacaattaagggaacccagacccatatgttaatttgataaatctgtgcaagctctgataacaaagtttgaatctgtttatcatttgaatgccctttaaattgaaatccagcaataaaccatactaataaacctatgattgatgcaggtatcgtcgtccacatcatcgaatgtatatgtttaaatatattaactttagtaacaagcgccgctaaattagttgtatctgataatggtgacattttatcgccaaacacagcccctgctataatagcacccgctgccatccctggaggaatccccaattgattaccaatagaaataagtgcaatccctgcagttgatgcagagccccatgctgtaccagttgctacagatgtaacagcacttataaaaaaggctgatattaaaaaatagcttggattcaataaatctaagccataataaatcaaggctggcactgtgccagaaaacatccaactgcctactataattcctaccgctagtataattaaaattgcaggcattgcagtatttaaacgttctgcaatgcctttttctaaatcttgccatgttaagcctacacgttttgcaatccatgtggcatatgctgaggcaataattaataatacttgaattggaatatcaaaaaacacaaagcctgttacaacaacaataaccattacaatcattgtcgaaattgattctaaaaaggtgggttttcttttcatcatctatcgtccccttcgcttattgatgagaaacctcttttcttcaatttattgcttttgcataatgctatatccttttctatcttcaagccatcatttattttaaatatttttctaaatcaagcttatctaaaccaatttcttcaactgttaagccttcctcaaagaagtctctctctaaaatggttgatgcaattacaattactgcatctatatttggtgtcggtacatcaataacacgacctaagcttgaccatagtactaaaccatatgcaatatcttcagttaaatatctgctttctacatgatttggtcctggaatttgtgaaaatactgggcttgtattaaacaaacgatttaatggttcatcttctttatcacgttctaaataaccacgttcaatacgtgattctttagctgttgataattcaaaacctaatctacggcctaaattcaaacgttctaattcgattgcatgaagtaatctaactgtatgtttagtaattccttctttatataaagcgaactcgccagcataatcaatgcgaccgacattcaataatgttggtcctggatgcacttcaggattaccattttcaagatttgttttaattaagctttcctcttttactaaatgatcataaatacttgaaactttgtcataacaatcatttagacagcttctatcatatgttgaaaagaagatacgacgtacatttagagataaatcaactgctgcattttcaaaatcgacacgcgtaccatacgtcaacgtattagcttccgctagttgtggttttgtttcaatatgtctatcttctaaaacattcataaaacgaattgaccccattgctgcagccatgttgaagaatatcaactgattatcagttacatgctctgccattacatcagcataatactctatgtatgaagatggaataatcacttgaacaatttcagcatcttttaaaacatattccatatcatcactaatatcagtgaattttacgaaacgttcatcaccttcattattaaaatcaaatccgcccttttcgattgcgttttgaaacttacttatagattgattacgacaatataatttaacatcgtggcctttgctcaccatatctactgctgccgtaactgcgccatttcctgatcctacaattgctattttcataaacaaccctctttctatctttggttaaaattaaaaacaaattatacgtaagacaatataaaaatgatgcgaattcattacgcatcattataaatgttaagtatatataaccttaaattaacctatttaaacgccgacgtccaccaattatttttatttttaataattgtttaataaacatgtttatttttgattatattttgttatagttaaagataatattacaattttcaaaggagtgtctaatatgacaactgaaatgaacgacgtaacaaatcatcaaccgaatcgcaaatccaatgatgagaacattatggcgatgcttatctatttattaagtttattcacatctattattggtccactgataatatggttattgaaaaaagatgaatcgaaactagttgatcgtgctggaaaaaattatcttaactatacgatttcttatattatttggtctatcgttttagtcgttatcactttaataggcgttttcctaattgctacagatattgatttcattattattataggtttcatcattacgtttatcggtattttatccatattcgctttctcaatattatcttttgtattcacaattattgcgtgtgtcaaatattataatggccaagaatatataatacctttaacaattcgatttatttaaacatattacaaataaatatttcctattaattatctgttaatctcattgtaactttgactaatttttattacaaaattagtcaaagtttttttattcttttacaaatcaataacattccccacaagaagcattaattttgttaaagtaactattgtcatcaattcgagatgtgagaataaaacagtcgctacgttttatttataaaaaaagatatagaactttggaggactttattcatgaaaaaattagtaacagcaactacgttaacagcaggaatcggcacagcattagtaggtcaagcacatcatgcagatgctgctgaaaattatacaaattacaacaactataactacaacacgactcaaactacaacgactacgacaactacgacaactacatcatcaatttcacattctggtaacttatacactgcaggacaatgtacttggtatgtatatgataaagttggcggagaaatcggttctacttggggaaatgctaataattgggctgctgctgcacaaggtgctggattcacagtaaatcatacaccttctaaaggcgctatcctacaatcttctgaaggaccatttggtcacgttgcatatgtagaaagtgtaaacagtgatggttcagttacaatttcagaaatgaattatagtggcggacctttctcagtaagttctagaactatttctgcaagtgaagcaggtaactacaactacatccatatttaatataaacacgatgatacatattgtcttgaaacttaattctagtacatatgtcatcaaaaaactttgagctttcctttataggagaagctctttttttgctatttttcgttgccacctacttatttatatttcctcccatattcaaaatattaattttttctaatactattaactttaaaactacgttatctaatttaattgatccagtttttccacattacaatattcatagttctacagtgcctaagttatatcacctccatcaaaagtacgcgcttacatcattgatacacaagacatcatgacatagttgtatactgtctaatcttctactatactaagataaaaggagtgatcttttatggaaaaagtttatgttgctggtgcaataccagaagtaggtttaaaacttttacaagaacattttgaagttgaaatgtatgaaggtaaaggattagtcgataaagacactttaattaaaggtgttaaaaacgcgactgccttaattagtttattatctacaaacgttgataaagatgttatcgatgctggtaaagacttaaaaatcattgccaactatggcgctggttttaataatattgatatcgagtatgcccgagaaaaaagtatagatgttacaaacacacctaaagcatcaacaaacgcgactgctgatttaacaattggattagtacttgcagtagcgcgtcgtattgttgaaggggaccaattatcacgtacaactggatttgatggatgggcacctttatttttcagaggtagagaagtatctgggaaaacaatcggcattatcggtttaggtgaaattggtagtgcagtagctcgtcgtgcaagagcatttgacatggatgtgctatacactggacctaatcgcaaagaagaaaaagaacgagaaatcggtgcaaaatatgtagatttagatacactattaaagaatgcagattttatcactatcaacgctgcttataatcctaaaatgcatcatttaattgatacagaacaatttaaaatgatgaaatctacggcgtatttaatcaatgcctctcgtggtccaatcgtgcacgaacaagcactagtgcaagcattgaaagataatgaaattgaaggtgctgcacttgatgtatatgaatttgaaccagatattaccgatgacttaaaatcacttaataatgtagtattaacaccgcatattggtaatgctacatttgaagcacgtgacatgatgtctaaaattgttgctaatgctgcaattagtgccgttcaaggtgagaaaccacaatttgtcgttaactaataattgaatttattataataacattataaaaacaagaacccccatatgttgagctctcgtttcaacatacgggggttttcatattgttgtattatttttctttcgatttatataagaatttagtttgtccagctgctaatgcatttggcatcattttcataatacgatttctaactgcaacaaataaacgactacgatattgggcaattttaccgatttttctagaacgcttaattacttttgcagtatgtttgacacgtattttatcataacgctgtaatgctttttcaaagtcgtatgcgttaaaacaatttactaatacgatagcatcttccattgcttgtccagcaccttgccccatattaggcgttgtcgcatgtgctgcatctcctagtaaaatagtacgaccataaacaaaagatttgagtggtttcaaatcataaatattatgcaataagatacctgtttcactttgtttgtctaagatctctctaacttcatttggatagtgattaaagtatgcttgcaaatgaggtttaccaaacgaactatatttatgattgttttccttcgagttaattgtaatgaaccaatatgcttgattatttaataacggaacaatacctactcttccttttcttccccagtattcttttgcacaatctggatgctttaaatcaatatcatcaattaaacctctaaagcatgtatacccttgatataatactttactgtcagcatttacagattgtctcactttagaatgaattccatcagcaccaatacataaatcaaatgcttcactttcttgttccgcgaaatgtatggtaactttatctgtctcattatctatatgcgtgacttcatgatttgtaaatattgcgtcatcttttacataagatttaataatgtcaattaatgtttggcgtggtaacgtcacattcaatgtattactttttaatttaacagtagttaacaggcgatctttgtcatctaacactgtcattgtagataagatttgcccagcatttttaatacctttagctaagtcatgattacctagttttttaagcacattatctccgataccaatcccagcgccaatttctttaactgactcatttttttcaaagactttaatagtatgaccttgttcttgtaataatgcagcagctgttaatccaccgatgcctgcacctataattgctatcttcatattgtcacctctatatttttcattcttttctattttatcacatgcactattgtttaaaaatgactcttggaactaacgtttcatttttaaggacttaagtgtattatctgcaccattgtatattacatgcacatttagacagcaatattcatttacatcatgtacatttgtaacaatgatgtgggatatagcatatttgatgctatatagcgttttttgttaggttaaaatccatttaactaacacactcagaatgcgctaaaggagctcgaaacaataaattgttccagctcctttaagcaccgatgtcttatttataatatgtttgtctaatatcatctttctttataccaaactgcttataggatttatccattaatttggcaattttatctgcccagcgaatgtcactcgcatattgatgttgcgcaggattttctggattccatcgcatttgatataaattcagttgattgttttcaaaatattcattacgaatgaactttgcaccaccaataatcgccttatctggtgatgtccattgttccttttcagcataacttttcccactacgaacagcactactatcgaatgctcctataccaaaaaagttgtaatagcgttttttcccatctttaatgccttttgctaattctgatttgccgttacctgtttctactaatgcatggctaacaagataaatgacattaacctcatatttttcttgagcttctagaaaaactttccctcgattttctaaaatccccttaccttttagcaattggttaacttcagattccgacattggcactttttctgtgatatccatatacttcatatcattgtctttatgtgaaatagtcattgctttagcaatttcattattatttgcttcaacaaatttaccatcctcttcttttgtctgtacaatacctttcccttgttgcattgaaacagcctcatcaaaagagtaattcacatcatttttaaacaatttagtttcattcacgatgagtaatacagcaaaaacaactaaaataactatcaatagtagcgttgaaatgcgtaacttgaaattcttcttcatatagacaaaacctcatttttcttacttagacaataaaaaatatgccactacaatcgctaatattacgattaaaaaagaagcgttaacgattactttcatcgttgttctatctctgaacatcatattaaagacaactagactaattgataatgaaacagcaaaaaaagtaatagctaacactaatttcatcataaatagacagactaaacctatgactaataatgtattagaaattacagctgacgtttttaacattctcgaattaatatgcactcaccctttttatttaaataacttacataatcataataatacatgatgtttcataggcctgtcgatgattgattcacaatagcacgtgatttttttgtttttcaatattattcatttattccatcaaaaacaccctttttaatttttacaaaaattaaaaaaagtgctcctacactgcttgcatgtagaaacactttttcattgtaatgttattcttctcgagacataccttttagcatattaagcatgtatgttaaactacggttcatgtcgtcatctttcaatacgcccaatagacttcttatagttgtcttagcatttggactcgcttgattggcaacgtgtaatcctttattaactttatttaggaagtcgcttaaatctgatacattgagttcacctaataaaaataccattgaagccatattagataatagccctgtataaatatctttattaagttcaactgcaaatttatttatgatgacttgacgtcctcgaattgcaccatttaaagcatctaatagttttgcatcatctaatgttttaataagcttgattgcttttaatatactatctttattcgctgcaattgcctctgtaacttcatttaaactttctaacttaatttgttcttctgatttttctaagcgtctaattttagaagatattctctcagccattatttatccacctgatttcccgggaaaacataatctgaacgttcccattttttctgtacttgaacactgtactgcggttgacgttttttattgacacggaaattattagggttcaacggtgacttaccacgtttcgtaattacctccaaacgacagctagtacgtttataagatggtgtatccgtgtattgatcaacatcactattagttaataagttaattgcacctagatctccattttccatcgcatcattatttaatggaatatagatttctttacctttaacacgatctgtcacgtgaacttgtaataccgcttctcctgtttcagaaatcagcttaacttctgcaccttcatgaatgcctctatcttcagcaagctctggagaaatttcaacaaatgcacgtggcactttgtatttaatcattggtgtttgataagtcatattaccttcatggaagtgctctaacaatcgaccattgtttacatgaatatcataaatttcatcttgcttaaagtaattatcaaatgataatgggaataattttgctttaccattatcaaaattgaatccttctaagtatagaataggctcatcagtaccatcaggttgtactggccattgtaaactattgaatccttctaaacgatcataacttaccccagcatatagaggtgttaagcgtgctacttcatccataatttcactaggatgcttgtaattccaatcaaatcctaatctattagcaattgcttggaaaattttccagtcaggttttgaatcaccaagaggttctaatgcttggtataaacgttgaatacgacgttcggtatttgtaaaagtaccgtctttttcaagtgaaggacttgctggcaatacaacatctgcgtatgttgctgtgaatgttaaaaattcatcttggactaccatgaaatctaatttttcaaacgcagcttgtacaaaattaatatttgaatccacaatacccgtatcttcaccatataagtacaatgagtgtacttctccgtcatgtataccttctaccatttcatgattatctttaccagcttttggattcaatttaacgccatattctttttcaaatttagcgcgaatatcatccgcttcaatactttgataaccagtaatcttatcaggcatacttcccatatcactacatccttgaacattattatgtccacgtaatggatacgcaccagtaccaggacgacgataattacctgttactaataataagtttgaaatcgctgtacttgagtcactaccaatgtcttgttgtgtaatacccattgcccaacaaattacaacagattcagctttagcacattcttcagcaaatttaatcaattctgattcaggaatacctgttgcttcttcagcaaaagccattgtaaatgtttctaatgatttgtaatattcatcaaaatcatctacccactcatcaataaatgctttatcgtgtaaatcatgatcaataatatacttagtcactgcacttaaccacgctaaatccgtacctggtttaggttgataaaaacgatccgcacgttctgccatttcatgttttctaatatcaaatacatgtattttttgaccaaataatttttgtgcacgtttcatgcgtgatgcgataactggatgagcttcggctgtattagtacctatcaatacagacattgccgctttttctaaatcttcaatactacctgagtcaccgccgtgtccaaccgttctaaataagccttttgttgcaggtgcttggcaatatcttgaacagttatcaacgttatttgtgccaataacttgtcttgctaatttttgcattaaatacgattcttcattcgtcgctttagaagaagaaatgaatgatagtgcatctgggccatgcttttctttaatagctgtaaaattatctgcaatgacgtttaaagcttcatcccattctacttcatggaactcaccatttttccttactagtggtttagttaatcgttgatctgaattaatatgtccccatgaaaacttacctttaacacaagtcgcaattttatttgctggagaatcatgtgatggttgtacttttaaaatttctctatctttagtccaaacttcaaatgaacaacccacaccacaataagtacacactgttttagttttcttaatacgctctttacgcatttctgcttctgaatctgagattgcaaatagtggaccataaccaggttctgcttttttagttaaatcaatcattgctgctaatgaaccaggttccgtatcagtcatataacccgcattaccttccatattcacttccatcatggcattacatggacataccgtcgcacattgaccacaagatacacatgaagactcattaatcggtacatcattatcccaaataacacgtggatgttcacgatcccaatcaattctaatagtttcattcacttcgatatcttgacatgcttctacacaacgcccacataagatacattgatttggatcataacgataaaatgggccgtaatctttttcgtatggcttctctttatattcatacgtttgatgctgaagcccccatgcatccatcgtattatgaatttcacaatcaccattattataatcacatactgtacaatacagcatatgcttttctaaaattcgatcaagcgcttctttttgagcatctttcacatcattgttcacagtatttacagtcattggacgatcaatcaccgtactacatgaacgttcaattttaccgtcaatctcaacagtacatgtatcacatgtttgaattggtcccatcgactcgttataacaaattgaaggtacaaaagtatcttgtgatttaataaattcaagtaaattcgtacctggttctacaagataatcttttccatcaagtgtaaccaccaaatgttcttgcatattactcaccccgtctatatatattttccgtaaatgacttttaataaattgctcatatccacctaaaataacgatgccccacacatctttcagatagaattaatttaattgtattactttatgtactagttgttaagtaaaattttgtattttgcctttttacaatcatttttatttgaaatattttgcgcgaaattaaatcatctttttgtttaattgaaaataattatcattattagttttccaattatctgtttcacgctttttgccatatctttcacaaccttattaatgacaatatttaataatcacctcacctaaaaatcgttatactatttataaataccctttttctgaaaattaataacccaagtttgataaatatctactatcatttagaaggtaatatttatctttaaattaaatttgtaatggattaatttataaaaatcaaatcaggcattaaataaaatagcccataaatacaaagtgttatcaccttctatttacgggctattagttctattcgttattctatttacagatcattctatctaattaatttgtgtacaattttgataacttattttcccttagtttactactctagattatcttttaataacttagtactttcagcttttgactgctcactaggaatgaagtagtacaatccgtcactttgaatgccgccttgaccactcaattgatgtttattaatcgtgtcattagcatctttataattgcttctaatcgtattcaaatcacctaatgttaaatctgttttaacattattttgaatttcattcattagactattaaaatgtgtaatcgatgatgggcttgcaatcttattggccatcgcttcaagcacaatttgctgacgttgttgtcgaccaaagtcaccaccagcaccttcttctttacgacttctaataaacttcaatgcttgatcaccatttacatgtgtctgctgtccttttgtaaaacgaacaccatcaacagtgaatgtatcattacttactacatcaacaccgccgatgctatctatcatattatgcaaaccatccatatcgattgtcgcataatgatcaattggcacattcattaatttttcaagtgatttaacagccatatttggtccaccatatgcataggcatgtgcaattttttcagtagtaccacggccaacaatttccgctcttgtatcacgcggtatacttactatttcagttttcttcgttttagggttgatagataaaatcataatactatcactacgctctccgccaccctttttcttacgatcagcatctgaatcgacaccaaataaagcgattgtgaatggatcaccatcgtttaaactcacttttttatctcttaattctgaatgattgcgatctaacggattgtgtatcttattaccagtaataaaaattttagcagctacatacacaacagctacaatcgctaagattactaaaataccgaatacccataaaaatatttttttcggtaggctcattttacttttagacgaacgtttcaatcccaccactcctttactattccttacatactttgtctgttttctctatttattatatagtaaaataatttttttactatacttctgtagacgtataactattttttatcattttttatctctagagaatatctatctgtatttttgataaccaccatttgcatttaaaattttaagtaccgtttcatgacatgctttattacttataataaaaggtgcaccctttaaatgatcaattgccttaccatctaaagtcgtcatttttagattcaatagttctgcaaataaaaactgtgcagcaatgtcccaaggtttaggatttgtattaatatgtgccccaaattgaccttttgccactcgcatagaatctaatccgcaagcaccaactaaacgataactaaatgaggcgtcaaataaatcttgcaccgtatctagattcatcacttgtgcattaaacgatataatagcgtcttccaattttaacgatggtggttcttccatcttaattccattacaaaaagcaccttctcctcgtattgctttataaagctttttatgcggataatcatatacgtacgataacattggtttaccttcataaaaatacgccaatataatacaataatcttcttgctgttttactaaattggcagttccatcaatgggatccataatccataaatgattaatttcattcgtaatcatttcattacttttttcttccgctaatagttggtgttccggaaaatgtgttgctaaaaattgttggaattgttgttgaatctgtttatctacatttgtaactaaatcaaatcgatgacgcttagtttctgtagtcatttccataattaattgcggaataacattgtctatttgtttcaaccacgaacatattaacttatctatttgctgtaatgttttatctgtcatttcgtccaccacttctcatatcattatcattttattattaccctatattaaaagaatcaacaatacaactgaagacttcttcattttatgcataaaaaaatcggctagtcacgtgctagccgacaaatagaaaggaaagtaagtaataaatattgaagatgttgtgatgtaacttgaacgattaaaagctatctgttatatagctctacccctttgtttaatcgctccccctgttacaagtaatatcatagcacaatcttttttaaaatgtaagcgttttccacaaaatttttacgattttttttaaaagatattgaaaatgtcctcattgtcactcttatgttatactttgtgtaatatatcatcttttaggaggtggctgtcatgaataaagctgaaaggcaaaatttaataattactgcaattcaacaaaataaaaaaatgaccgctttagaattagctaaatattgcaacgtatccaaacgcacaattttaagagatattgatgatttagaaaatcaaggtgttaaaatttatgcgcattatgggaaaaatggtggttaccaaatacaacaagcacaatctaaaattgcattaaacttatctgaaacacaattatcagccttatttttagtgcttaatgaaagtcagtcgtactcgacattaccatataaaagcgaaatcaacgcaattataaaacaatgtttaagtcttccacaaacacgcttaagaaaattgcttaaacgcatggacttttatattaaatttgatgacacacaacatatgacactcccaatgctgttttccgacattttaatttattgtacagaacgaaatgtgatgttagtagatcatagggttgatgataatattaaagctgaaaacgttatatttattggccttttgtgtaaacatggacattggcatgcagtcatttatgacattgctcaagacaaaactgccgaactcgaaattgaaaatattatagatatttcgtattcattcggtaagacgattcaaaccagagacatatccattgataactatcatcaatttttaaaccccatcgattcctaaaaaacagcagtaagatgattttcaattagaaaatatcttgctgctgttctctatttatacaatacttcgtattgaatggcttcgctttcctagggtgccgtctcagccttggtcttcgactggcactgctccctcaggagtctcgccattaatactacgtattaacatgtaattttactttgaaatacttaaaaaaataaaacactttgcccaacttacactaccaatagaaactgctgttagaattcctcaaaatgatatttcgcgatatgttaatgaaattgttaaaaagatagctgatagcgaattcgatgaattcagacatcatcgtggcgcaacatcctatcatctaaaaatgatgttaaaaatcacctcatattcatatactcaatctgaattttctggccgtagaatagaaaaattacttcataacagtattcgaatgatgtggttagctcaagatcaaacaccttcttataaaactattaatctttttagagtgaatcctaatactgatgcgctaattgaatctttatttattcagtttcataataaaatgcatatcaaaaaagctgatttctatcaaataattaatagaaatcagcttttttcattgcctaaaaacttaatgtcccgacctctttatctacgcataaatacttattactgatataacgaaagaaacaaaattatttgctatatgtaatgcaattgttgaacctaggtttcttccagattttaaataagtgaaaactaatatgatggatagtatgagatatggaccaaactcaaacggcgactttgcatcagtcacatgaataaatgcaaataagaacaccgaaacaatactcatagctataaaattaaacttcttacctaattctccaattaaaatatgtctaaatacgatttcttcaactattggacctacaatcacaattaataagaatgctacaggtaaaaatgcaggcacttcaaacattttatttagctcaagttcattggctgtttcactatattgcaaatgtttaggtagaaactgtgtcatatattcatatgtataaattaagatgagagcaataatatacgttattgacaatctaagccaatattttttgatatacgcaaaaccagctcgaagccttgatggcatcacttttaaatgaaataaataaaatgcgccaatcccaatcgtatatgctaaagcttgtgtgatagtcgctacaaatatcagattactatcgatttcataataaccaaacaaaattggtcctatgtaagctgcaattgtgagtgcataaaatataacacctataattggaattataagcaaatctctccatgctatatctttaaacgtgtatttctttttttcattttccactgttatatcctttcctgtttaataattgatttttggaggtacttctacatgataaacgaaactaagtatatgagacaacaaattactaatttgattcaaatcattgatacgattaaatataatactttaatgacagattggaacattcaaacgcatatttataaatttaaccaaatagttactaatgaattgaataagttcaaaggctttgaaacatcatatataataaacgaaaatcaagtttcctattatgaaattataacactacttaataaacgtcccctccgacaagtcgactatggtaacaaaattcaatatcttaatttttatcatacagaactatctaacgcattatttgcaattaaatttgcccattaacctatttttcataaaatgtcatttaaacaagttatttattaaaattcactttattacataaattatacaattaaaaagtttcttcaaattgtaaagatgcattaatcgagttataatcataatgattaagatggtagatttagtcttatataactacatttactaagatttaaatagatgagtacataatgtataaattgggaatatacagtatgacttacggtaatatatcaatatattgatatattatttgcacatgggagtatgctattttttatctatacatcttaaaaaaatttacagttttacaattcaatatcattaaacaaacaacatattcagcttatttttcattctcttacgttacaagttgtaaataccatcgcgttaaacaacaatagccaacgctaataaaatatattgcgttaaagtggagtgattaatatgtcaaacgtactaacagaaatagatagtcaatatccatatatgactaaaaatgaaaaaaagatagctaaatttatactaaattcacctcaaaaggtgattaaaatgaggtctcaagacttagcaagcttattagatattagtacatcatcagtcattcgattcagcaagaaaattactgatggcggttttcacgacttgaaaataaatatatctaaatatgttcctaaagcatcatcaatttacaatgttgaattaatgaataacgaaagcacagaatctttaagaactaaactccatacacgtactacacgcgcacttaatcatgcaaataacgaattaaatgataaaactattgatcaaatatgtcattgtttaaaacgttctgagacgatttttatatatggttttggcgcatcttttgtagttgctaccgacttataccaaaagttatcaagaataggtcttaatattcaacttgttcaagaaacacatatttttgctacattattagcaactcacaattcgaacgacagtgttattcttattactaacaatggtacgcaaagtgaaatgcaatcaatggttaaagttattgatgactaccatatacctataattacaattactagtacaagggataatcccgtagcacaggcatcaaatattgttttaacttatgggaaaactgatgaaaatgagatgcatatgggagcaacaacttcattatttgctcaaatgttcactattgatattttatattatcgttatgttgcattaaattatcacgcatcattagatttcataacacaatctaaaatggctttagataactatcgtaaacatttatcaaatattaactttaaacattaacagtcttatataaattctttaatcatgtcatataataatttatgcatcattttcaaagcttacatgtcttttatcttgtataacatacgcatatgaccaatgatttgataaggccattcaatttcttatattaaaaacaaacgcagttgattaacggattcattccatatatcaattgcgtttgttattttaataatgctattttttattttaaagcccacagtaaaaactaacgataatattgccacttataagtttttcacactacaacttcgatttaagctatatttataaaaaaatgcgcctactcataacattctttggctatttaactttaataagctagggccaagtttgtcataagataagcgcacattataatcatactattttgcttttacattatttttattatatctaataaaataataaatcgttacaatcgttaagaagatgacaccaataagcactgatattctagtttcaacattaaataccataccaaccaatactaatattaagaataagattgttaaatagttagttactgcgccaccaggcattttgaatgggtgaccttccaattcttcagggtgtaattttctaaaacgtaaatgactgaataaaatcataaaccaaggaatcatacctggtaaaatagacgcactataaacgtatacgaaaatactcttcgctccatcgatatataaaggtaaaattacgtttaataaagcaccaattaaaataccaagagatactgctacaacagtgtacaatggtacaccatttctcatgattttagtaaatattttcggcatttcacctttatgagcaagtgtataaatcatacgactcgcactgaaaatacctgagttacatcctgacattgctgcagttaatacaacaaagttaattaatccagctgcaaatgtaataccgattttagcaaatgttgcaacaaacggacttccaatgtctcctaattgattccaaggatacactgaaacaataacaaaaatagcgcctaaatagaaaattaaaattctccagataacaccattcactgctttaacgatatttttctgaggatctttagtttcacctgccgtaatacctatcagttccacaccttggtatgaaccaattacaattgataatgcaaagaagaaaccaacaataccatttggcataaatccgccatttgtccatagattagaaatacctaccgcatggccaccatttccaaaaccaaagaaaataagaccaaaaccagcaataatcattaaaataattgttacaactttaattaaagcaaaccaaaattcaaattctccaaacgcttttaccgagaataaattcgctgccattaataataaaatagcaataacaccaggaatccaagttggcaattccgggaaccaaaacttcatatattctcctactgcgatgacctcactcataccaactacaatccattggaatatattactccatgctgtcatataacctgctgcaggatgtatataatcacttgcaaatgttgcaaatgatcctgttgtagggtttaaataaatcatttcccccattgctctcatgattaaaaataaaaagatacccgcaattaaatatgcaaggataactgatgggcctgtccatttaattgtacttgtcgcacccatgaaaagccccacgccaatcgtaccaccaagtgcaatcatttgaatttgacgggcactcaatcccctttgtagttcattgttctccataacttcttaccccatctctgattgatactaaataaatccataaaaaaacttattgccgtaattatactataaattatcgattttggtacattaatatttgcataccatgcaatcgtttacagaactactatagcaggcttttgcaactttgcaaacaattattttgtgatttttctaaaaaattaaaaaagttgctcaagtaccgttgagtcacatacaacttcagctattcttggtaattatgatataattttaataatattaaaaaggagtatatcaatgttaaaacaaatactgctacgtgctacaaaaatatcggtactctttgctgtagcatttttcatcataaattatatcggtatggaaaaacctgacatcctatatttagttggaagaactattattgcaacacttgctttcatactcatttgtcttacagtatttactattattaattctccagagcgcaagattaaactcggtacgactttaccgattgcattaattattggtatcattttcggcgccatatttttaacggtacaaatcggtgtcatcactgggttaatcatcggtgtgattgctacgtttatttgggaattgattgaaaaaaataaaggaggtcgttcatcatgacaacagcattaattggtgtaattgtattaatcttactaattattagctttgtgccaaactaccgtgctatgaaatcagcaaaagaacaaggaagtaatgcaacaagagctacaattatggtaggcatagatattatcttaattgtacttatcatcgtgacgttattattaaaatatatgtaactatttaaaccaccctatctcatacataaacatgaacgttctaccatttcacatacatatggtcgtccatttaatgaggtaaggtggttttctcgttaaagtttaccttgtaatagtaaaaaatagccaattgttgcgagtattaagtaaatcattgaaccaacaacaaaagatcttacttgcacgcgaaatggtgtctgtttgttaaatataggaccaatcaccaaatttccaacgcctaaaattactggaccagctagaaaaaacaatataatgtaacccatcatgatacgcctcctatttcgtaaagaaacgcgctacaatttgatcgtaatcaatatcttttgctacataatctacattagaaaagtcctgtgcgcttgtcattttattcgtattaacaataacatctaatccagctgcaatcgcggctgttgcaccatttacagaatcttcaatagccaaacattgtgtcggcatataatttaattgttgtactgcagataaatataattcagggtcaggtttaacttgttcaacatcttctctaccaacaactacctctatataatcgtctagacctaatgctttaaaggtgggcattatttccgctttcacactacttgtggcaattgccataggaatgtgacgttgctttaaaaatgccatcaatgatttaatcgtatcaatcatcggtaatgttgtactagtaagatgatgttcttcataaagtttatctttattttccgaaccaatcgctttaattaaatggtcatgcaaatctgtagctgctcctccaatagaagaacgataaaaatcaatgcttataggatcggcattatgcatctctaaatgtttattaataacattaaataaatgttgttccgtatctattattgttccatcgaaatcaaatataactgctctatacatatatttactcctctattttttctctttatcaaagcttaacatagtccgatgaccacttcattctattagtgcaattataacttttttgaccaatactttgctaaaataggccctgttatattatgaatgaaactaaacactgcgcctggtactgctgcaattggattaaaatgcaatgctgctaatgacacagctaaaccagagttctgcattccaacttcaatactgactgctttttgatcttgtcgatctaattttaaaagacgagctaaccaatatccaatcgtataccctaatacgttatgtaaaataactactaaaaatattaataatcctgtagttaagatttggtgcttactgccacctacaactattgctaaaattaatgaaatagcaacaactgatataattggcaaagctgtagaagctttttcagcaattttacgattaataatttgcaaaacaatacctaaagcaattggaattaatacaacttgaacaactgaccacaacatactcacgaaagatacttccaaccattcatttgcaaatagatatattaacgcaggtgtaacgaatggcgctagcaacgtagagaccgtcgtaatagaaacagaaagtgctacgttagctttggctaaataactcattacattacttgatgtcccacccggacaacatccgactaatattacgccaacagcaatatcaggtggtaaatgaaaagactttgcaattataaatgctaatgtgggcataatactgaattgtagacagacaccaataattactgctctaggtgctttaaagaccattttgaaatcattaggtgtaattgttaatcccatacctaacataacaataccaagtaaataaggtacccatttacctaatgtcgcaacatgttgtgggaaaataaatccaataacagctgctactaacatccataccaaaaaactcttcgtggcaaatatactcaatttttgaaacattgttaacacatcctcgtcgataatattgaaaaatattaccataagaccagtaaggttacaattacttttctgaaaattaagattatttagtcattctcttcttattgcaaatattttatcactgataaacaattattttaaacttcattcaaaagtcttagtgaataaagaaaaaaagcgtggtaaaatcaacttgaacaaaattaagtcacctttataaatattaaacgtgtatttaatgccatgtattcctcgggaggtcctcacatgttaattgataaattcgaaacatacatcatcaacatcgccggtttaaatgaccgtactactagaaaaaaattaagtaagttatgcaaaagtgtacaattttgtgatgcgttgcaattctcaataaacaaacagtttaatcagtatgtattagaaattagcttaccaaagcaacaacttccatacttcatttcatttttaagttttcatcagtatagtattttccaagtactttcaccaaagaaaataaatgaattacttgattctgataatttatatcaatctgcaaagcgtttcgatatcaatattgatggcttgcaagatgctttcattaaagacaaagtcatcgatattatgaatatgttccaaaatcacactgatatcacttatacgttgaataagtctcatgcacatattatatgtacgccagaaatatttgctaaattgttacatacgattgcaactagaaatatcgacattctatctgccaattatagatcgtcatctatgagcaaagctcgtatatcataataaaagacacatctatacgatgatcatttacaatgattgcgtatagtgatgtgtctttttttgtattatttatcttcggacgattgatcctcaaccatttgttcaaatgcttcacgaacttgtggtactgtcatacctactacaacttggatactcttaccactctttactaatccgtgtgccatttgttgatgcgtgaaatattccgtatctgcaactttactttcatcataaacagttaagcgtaatcttgttgtacagttagtaacatctttgatattttctttgccgcctaaaccgtcgaggtaatatgcagctttgtcttcgtattcattaccagatgaagcacgtttagaatctacgctatcaccttttttatttttgtaatcttgcttagaaaataatttaacttcctcttctgttttcttacgtccaggtaatggaatatcaaatttcaaaattaagaatctgaataagaagaagtaaatcgctacaaatatcagaccgataataacttgtgcaacataagtaccccaatgttctttacctaatggcaaccagtttgttgaaataaagtctaacaagccaccacccatgttacctacaacaccaaatgcgtacattaaagtatccattgatgctgctaaaactgcgtgtaaaacaaataagtatggtgcgatgaataagaatgtaaactctaatggctcagtaatacctacaacgactgctgttaatgtggcaggaataagtagtgccgccacctttttacgattttctttaggtgtcgtagcatacattgctaaagcaatacctaaacatccaaatactttcccatttccttgaagcataaagccataagggaattgctcttttaatggcttagtactcttagcaaactcatttaaatgttgtaaccattcagctttcaagccgtgattgactactactggtccaacttcaattggtgcataaataaagtgatgtaatcctgttggtattaatacacgttctaagaagtgatacaaccatacaccgatatagcctgaagcaatgataaagtgttgcattgaaccaataccgtgctgaacagttggccaaataacacaagtaattgctgctaatggtaacatcacaaaaaatgaaatcgtaactacaaatgttaaaccttggaatacaccaaccatttctggtaatcgtttactatagtatctattgtgaatccaagtaataatagctgaaataataataccacctagaatattcgtatccaatgtggcaatacctgcaattgattttaaaccaggtacattttcaacgcctttttctaaattagcgccaaacgtatgtggccattgtgttaaaatggcatttataaatgtattaaacattaagtaacccatcaatgctgcaagtgctgcatgacctggtgcttttttagctaaagaaagtggtagacctacaacaaatacaacttccatatgcgtaaaaataacccagccaccagattctattactgaccaaaatttaaaccaaaacgtatgttgatctgctaaactccccatgattgtaggatttttaaataatgtcgcaaagccaagcactatcccaaagaaagcgaacattaataccggtacaatcattgcactaccgaaacgctttatcgcattcatcttctattccctccatatcatctttcctaacaatacatctaattagattcatttataaatagatgtcttactatttaaatataatatatagtaaacgcttacacacctacaacgacattgacgtattttgaaagtattttgtataatcagattatcttttcatatagtgaaaattttttcacgaccttatatatgacatcgttgtatttgtaatacattcgttttaaacgcataatcaaacctatatcaatacacaaatatatataatgacatacaagattttaatgtaataacgatctattacacatttattttcaaggaggttgaatatgtttttagatgaacacattaatcgaaactttgataaacttaatgataatgatttacatatcgctcactttatcaatacacatatagatgaatgtaaaaatatgaaaatacaagatttagcgcaattcacacatgcctcgaatgcaaccattcacagatttacacgcaaattaggttttgacggttatagtgattttaaatcgtaccttaaatttgaaagtaataagacacaccaattaccttctaactctatcgatagtttcaaacaagaaatcgatagtacattcagttatttagaacgcgttgattaccagcttcttactaaaaaaatgcatacagcttcaacaatatatttgtatggtacagggcgtgcacagttaaacgttgcttcagaggcacagcgtatattgttaacgttacataatcatgtcattgtacttcatgatgaacatgaacttaaaatgattttgaacaagagtgaacctaatgatttattctttattatttcattatcaggtgaaacacatgaattattagaagtaacaaacttgcttcaacttagacaaaaatactttatttctgttactacaatgaaagataatacccttgctcaaaaagcaaattacaacgtctatgtatccagtaacacattctacttaactgatggtacagactattctagcttcatcagttatcatatattctttgaaacacttgtaagaaaatataatgagtatttactacataatgatatttcaaattagaaaaaaggaagttatgatttaatggccttgagcctatcataacttccttttatcattttattgttgtgttgatgtttcgataacgtggtacatcttatcaaacatcaattcgaaaccatgcaccatggcatcatgatattcttttttcttttgcttgtattctaaattagtaaatcgtctttctttttcaactaatgaacgataataaaatagcatttgggtgccacctgtttcacgttcaaaaaattctacctcaatgacatcttgcgtttcacttagtccaggcataccgatagtcatcttaacgtattcatccataactaaagattcataaatgccttcaatcacatttactttgccattacgttgttgatctacaatacgatatttaccgccttctttaacgtccgcttcaatctctttattcgttctggctgatgtcataaaccattgtttcaacaaatctttctttgtccaagcttcgtatactaactctggagaaaatttataaagcttttcaatttcaacttcgacatgttcattctctacattaaattttgccactgttgtccacccactttcgctcttacttttattttaacgtatttttgctcagttccaaacatagatgatcatcatttttaaaagattagcgttatacggtgagtacaacatgatctgttaatataacaagccaccttacttggctacatcgatatattgttaagcattaatgtttcatttcttgactagtgttcttttttagctttggaaaattaaataaaatcgcaataagtccgcatacacctaataatataggataaatgctgtatgggaataacattaacggtgaaataccagctacaccagccgctgaaatgacttgcgggctatatggtaataaaccttggaagcagcctccaaatatatcaagaatacttgctgatttccttgaatctacatcatattcatctgcaatatttttagctaaaggacctgacataataatagagatggtgttgtttgccgtggcaatatctgcgacacttaccaaactagcaattcctaattctgcgccacgctttgatttcactttagagcgaacaaattgcaacaaccattcaataccaccattgtgttgaataataccgactaaaccaccaattagcaacgcaatcatagcaatatcttccatgcttataatacctttggacactgcatctagtagccccatccaaccgaatgaaccatctatgagaccaatgattccggctaataatgttccgccaatcaatacgataatgacatttacacctaataatgctaataccaatactaagatatacggtacaactttaattagattataatcatagtttttagcatgatttaaagaaatgccattcgttaagaaatacagaataataatcgttaaaatagcacctggcaatacaattttaaagtttactctgaatttatctttcattttcgtatgttgtgttctaaccgcagcaattgttgtatctgaaatcattgatagattatcgccgaacattgcacctccaacaactgtagccattgctagcgcagttggtacatctgtcgcttgtgcaaatccgtaaccaacaggtgctattgcagcaacagttcctacagacgtccccatagatatagaaacaaacatacaaatcacaaacaatcctacaataattaaattttctgggattaatgatagtcctaaattaactgtcgactttacgccacccattttttcagctgtatttgaaaatgcacctgctaaaataaaaatcaacatcattaaaacaatgtttgaatggcctgcacctttcgtgaagacctcaacttttttagcaaatgattcttttcgattcattaataacgccacaattaccgttatcgtaattgcaacatttaatggcattgaagtaaaatcacctgtgataatacctacgcctaaaaacaacgccacaaataataacaaggggaataatgcccaagcattgctctttttatgtacttccatcctttttacctgctttccaattaaaaatacctctttctcacaaacgatgaagaaagaggttttcatgtgctttacctgcttatcttcaaaccattacggttactggaattggcacattcgagatgttgccgaggcttcatagggccagtccctccacctctctagataagtgatgcttatttacgtttacgttacaagataatccttagtacgtcaatcataaattaatcaggagtcgtataatatttttcataaacaatcattgctactgtaataataatcaaaacaataatgctaataacaagtaaaagccaccatttaagcattaatgcaataaaaatgaacacgatagacacacttactaatattaatgatatgactttaaattgctgaacacgttgcttggagatgactttcaactgtttgtttgatagacgcgtattttttatactgattcccagtatattttctaatatttgaaccaatacgatacttattgcaaatataataattggtaaaacatcatagctccctatagttaatgtataaattacaaatccaatgtaaagtaaccctgagacaaaggataaaaagtatgcgacgtatttgttaaacttaatgatatgctttttaacgttttgatgtgtaaaccatacattcgaaacgatcgcaactgctacaaataatgtgaatactatatataatggtaatttttgttcaggaaaaacagtcgctattccaaaagctaatgctaaaatcaaaaataatatagctctagatactattaatgccataataacaacccctttgtttaatatcgagtttgcaaatttacgtttatcagcgtttctatgatcagtacttctacgggtagcgtttctatgtaatttacatcatcttaacatataaatacttcgctatttaattgaaaacatatcctattattctttgtccgttctgacgtttaatatctagccttaggcatttcacttgttaatgaatttaactttcttccactaaccgtccctaaacccaatcccgcaacagtttttaactttttcgttgttgtcctgacatcctcattaagaaagtttattctgcttaaaacttataatccacaccctgagcaaacgctccttatgacagagtattaaaataagccgataaagatacacacctttaccgactatttaaaatacacttcaccaattcattttaatttaatggattgaagtaactaaattaatattatgttgttcaattaaaagcttcatacaaacctaatctatttgcactccaccgctaacaccgaacacttgtccggttgtataacttgattcttctgacgctaatagcacataagttccacataactcaacaggttgacctgcacgacctaaaggtgttttttgaccaaatgttgggattttactttgaggttgtccaccagaaatttgtaatggtgaccagaatggaccaggcgctacacagttcactctaattccttttggtcctaattcttctgaaaaacttttagttaatgaaataattgctgcttttgaagcggcataatcatgaagaataggactaggattataaccttgtacagatgatgtcgttgtaattgacgcacccggttttaaatattccaatgctttttgaactgtccaaaatagcggatagacattcgtttcaaatgtttctgtaaatgcctcagttgtaaatccatgaatatcatcatgatactgttgatgtccagcaactaaagtaacattatctaagccacctaattgttgatatgcttgttcaacaaggtcatagttgaactgttcatctcttatatcaccaggaattaacactgccttttgaccactttcttcaatcacttggcgtacttcttgtgcatcttgttcttcactcggaagatagttaatcgctacatctgcaccttctttagcatacgcaattgctgctgcacgccctattgctgagtcaccacctgtgactaatattttatagccttgtaagcgttgatgaccttggtaagacgtttcgccacaatcgggtgctggcgtcatttcagattgtaaacccggtacctcttgttcttgtttttcataatccgttgttttaaattttgttctaggatcttgagctgccatttttttacatctccttattcgcttaatggttattatttacccaatcttcctaggaacttaatcatgattacactaaaaattactttcttctttataaaaacaagctcgaattattcatgcaatagtctctttacaaattcaacaaaatactcaggtactttttccagaatcctttcatccggtttatattgaggatgatgtaaatcatattcactatgagaaccaattaacgcaaatacacttggaaaatgttgactataacctgaaaaatcttctccaatcgtaagcggctgttccatcatttccaccttatatccaacatgttgggctactgcaattgctttatgcgtcaatgcctcatcattcatcacagcgccaggtaaatgcgtataatttaaattgattttcatattatatgcttgagccaatccgtccgcaatatcttgtaatcgtgtttctacaagctttcgtaccacaggatcaaaactacgcactgtgccttgtacatacgcatgatcagcaatgacattccaagtattaccacatgatatttgtccaattgttactaccgcttcatcaaacgcagatagatttctactaactatggattgaatactattaatcaattgcgccaacacaataactggatcgttgcattgttctggctttgcagcatgaccacccacgcctttaatatgaaactcaaaacgatctactgctgatgtaattgcccctgttttgattgcaaatgtacctaccgaacgcgatgggtcattatgaaaacccaatactgcttgtacatcttttaatgcatgtgtttcaataattttaaaagcgccatgtcctagttcttctgctgattgaaaaatgaatttaacacgcccagtaagagtgccctcaatttcttttaattttacagctgtagccaaaatactagccatgtgaatatcatgaccacacgcatgcataacaccttcattttcagatttaaaatcctgttcaacaagctcttgaatcggtaaagcatcaatgtcagcccgaacagctatacaactcagaccttgtcccacttcagcaacaagcccagtcgcaagtggtaagtctaatattctaatatgatgttctgttaaaatatctttaattttttgtgtagtcttaaattctttatcggatagttctggaaattgatgaaaataccttctccaggtaacagcttgatcttttaatcccatcggtcattccccttccttaagtcaatgatatgttgtctaccctacgatgatcatctttgactattaaacgatgatttcacaacaatgtactcttgttaattgctttcgttaatgatagacagttgtttaataatatcgtaacactgttgtcaaactattctaacttttataattgagactctatacaaaaacgtgttctcgaatatacttgtttttacaaaccacaaaaagctctaaacattagtttaaaccaatgcttagagctttctaattattttatgctttaaaagatactgtgttatctacgatgaccttaccgtctttaataactttttctgcgtgattgataccaaaatgatatggaatatattcatgatttggtgcatcccaaattactaaattagccttatcacctgtgttaattgtacccgcgttaatgtctattgctttagcagcattgaccgtaacagcattccaaacttcattaggtgatagctttaatttcaaggctgcaatcgccataacaagttgtaagttgtttgtgacactactaccagggttataatcagttgctaatgcaatcgcaccgttattgtcaagcatgcctcttgcatctgcataatcttctttacctaaatagaacgtcgttgcaggtaagaggacagctacagtatcactatttcgcaacttttcttttcctttatcactagaagctactaagtggtctgctgatattgcttgttcatcaattgctaattccagtccgcctaacggatcaatttcatccgcatgtattttcactttaaaacctgcttctttggctttttgcatataatgttgcgattgttctattgtaaatacacctgtttcacagaaaatatccgcaaagtctgcatattgttttacttccggaagtaacgcaatcatttcttctaaaaatgcctcatttgaacttgcctctttaggtacagcatgaggccctaggaaagtatgtttcatgtctaaatcatatttctcagctaaacgattagacactttcaattgcttcagttcattttctctatctaatccataaccactcttactttcaactgcaagcacgccgtgtttaatcatagtaagcaaatcatgctctgcttttttaaacaagtcatcttcggatgtttctctagtagcattaacggtagataatatgccaccacccatttctaatatttcaaggtaagacttaccttgacgttttaatgacatctcatgttctcgagatccaccaaatgttaaatgggtatgtgcatctactaatgctggggacactaccttcccactagcatcaatcgtctcagtcgcatcgtagtcatctgtatgtgttccagcatatacaattttgccatctttaatgacaactgtaccatttttcacaacatttaattcatctaattccttacccttcaaaggtttatctgttgatctcggtaaaattaattctgctatatgattaattattaaatcattcattacttatcacctgctttatcaatcattggaatatgaatacctttttctttagctgtttgaatagcgatgtcatagccagcatcaacatgtcgggcaacacccatacctgggtcagtcgtcaatacacgttccaatcttctttcagcacgctctgatccatctgctacaacaaccatacccgcatgaagtgaatatcccatgccaacaccgccaccgtgatggaatgaaatccatgaaccacctgcagctgtgttaatgagtgcattcaatacagcccaatcaccaaccgcgtcactaccatctttcatactttctgtttcacggttaggactagcaactgaaccagcatctaaatggtctcgtccaataacaattggtgctgaaatttcaccgtcacgtacaagacgatttaaagctaagcccattttcgctctttctccatagcctaaccaagcaatacgtgatggtagtccttgatatgaaattttttcttcagctaaatcaagccatcttaataacttttcattttctgggaaaagtttgcgcatttcttcatccgcacgctcgatatcttttggatcaccactcaacgcagcaaagcggaatggccctttaccttcacagaataatggtctaatgtaagctggtacaaagcctgggaagtcaaaagcatttttcactccgttattgaaggctacttgacgaatattgttaccataatcaaatgctacagcgccacgtttttggaattcaagcattaattcaacatgctttgccattgaagcttgtgacagttcaacatattttttcggatctttttcacgcaatactttcgcttcttctacagagtatccttgtggcacatatccatttagcggatcatgtgcacttgtttggtcagtaataatgtcaattttaaatcctttttctagaatcgcttgatggatgtctacagcatttccaactaacccgattgataatccttctccacgttctttcgcctcttctgctaattttaatgcttcatctaaatcagctgttttaacatcacagtatttcgtatcaattcgcttatcaacacgtgtttcatcaacatccacgcaaattgctaccccatgattcatagtaattgctaacggttgcgcaccacccataccacctaaacctgctgtcagtgtaacagtgcctgctaaatctccattaaagtgttgattacctagctcggcaaatgtctcataagtaccttgcacaataccttgagaaccaatatatatccaactaccggctgtcatctgtccatacatgattaaaccttttttatctaattcattaaaatgatcccagtttgcccattcaggcactaatactgaatttgaaattaatacacgtggcgcttcttcatgtgttttaaatacagcaactggctttcctgattgtactaacattgtctcatctgattctaattctcgtaacgttttctctattgcttcaaaagcttcccaattacgtgctgcttttccaataccaccataaacaactaaatcttctggtctttcagcaacttctgggtctaaattgttgtataacattctaagtactgcttcttgttcccaacctttacactcaatactcaaacctttttttgcttgaatttttctcataaaattcgctcctgttcttttaagaagttaattccactaaatttaaaacgcttacattattatcttcaatattcattatagtatgttaaaatatagccaacaaatataaataaactaattatccatagcttgaatctataaataaaaggagcaaaacacatgaaaattattcagttagaatacttcttggctatcgtgaaatataatagttttactaaagctgcacaatttttacatattagccagccatctttaactgctacgattaaaaaaatggaagcagatttaggttatgacttatttacacgttcaacaaaagacatcaagattaccgaaaaaggaatacagttttatcgttatgcgagcgaattagttcaacaatatcgatccacgatggaaaaaatgtatgatttaagcgttacatcagaaccaaggataaaaattgggactcttgaatctacgaatcaatggattgcgaatttaattcgaaagcaccattccgactaccctgaacagcaatatcgtttatatgaaatacatgataaacatcaatctatagagcaattactgaattttaatattcatttagctataacaaatgaaaaaataacccacgaagatataagatccattcctttatatgaggaatcttacattttattagcacccaaggaaacatttaaaaatcaaaattgggtagatgttgaaaatttgccactcatattaccaaacaaaaattctcaagtgcgcaaacacttagatgactattttaatagaagaaatattcgtccaaatgtcgttgtagaaacagatcgattcgaatcagcagttggatttgttcatctcggcttaggttacgctatcattccgagattttattaccaatcatttcacacgtctaatttagaatataaaaaaattcgtccaaacttaggccgaaaaatttatatcaattaccataaaaaacgcaaacactccgaacaagtacatacattcgtacaacaatgccaagattatttatatggacttttagaggctctttaacttaagttattagagcctcttatgcagttgcgcagatcatcgtataaaaattaatgacgtcatttcaaaaatcgatacaaaaataatttattataaaaattctaagaaagaagtgaagcagatgttaaaatctattaatcatatatgcttttcagtcagaaatttaaacgattcaatacatttttatagagatattttacttgggaaattgctattgactggtaaaaaaactgcttattttgagcttgcaggcctatggattgctttaaatgaagaaaaagatataccacgtaatgaaattcacttttcatatacacatatagctttcactatagatgacagcgaatttaaatattggcatcagaggttaaaagataataacgtgaatattttagaaggaagagttagagatattagagatagacaatcaatttactttaccgaccctgatggtcataagctagaattacatactggcacacttgagaacagattaaattattataaagaggctaaaccacatatgacattttacaaataaggtgtcattataaaaaggcctcttgaactccgttaaaattttaattaattattatataataagagaacttttcaaacaatacagttgttatttttgctatttcaacaaacataaataagcagtaagatgactacaacttaagagtcttcttactgcaattatttttcaaatatatcaacgttaatataacttctattaagaaatactcacattctgccctgcaatgcaaatctcgtcacatataaatatttttaattattttaaaaaatgatgcactaaattagcaacgagcttagcagttctattgtcagcgtcatatgttggattcatctcagcaatactaactgaagacaccttatcacttggaataatacgttttgctaattcaagaacagtatgtggatacaaacctaacactgccggcgcacttaccccaggcgcaaacgcactatcaatgacatccatacaaatcgtaaacataatgacatcatgttcatgtacaaaacgttcaatcatatctttaattgttggtgatacgtgactcaataattcatctgcaaagacataatcaatctttttctctttagcataatcaaataaactttgcgtattaccaccttgagcaataccaagcactaaataatctgtgttttcatcttcttctaaaatttgtctaaagctcgttccagatgtagattgttgttcagcacgtgtatcaaaatgcgcatcaatatttatcacaccaatagattgtgttggatagactttacgtgttgctaaatattgagcatacgcaatatcatgtccaccacctaataaaaatgtttgtctatgattagcaattgacttcgctgcaagcatagcaaattctttttgagtatcaattaattcctcatgatcatgataaacatttccgtaatcgactaaagtttcacattgattcaaatccggcaaacctgcaaatgcttgtttaatcgcatctggtccttcttttgcaccaatgcgccccttgtttaaagcaacacctttgtcaacagcatagcctaatataccgacccctgatggcatactactcttttccagcttagacaaatcttcaaatgttactgtttgaaaatgtctaaattttttcgggtctgtttcactatctaaccttccagtccataaatttggttcaccttgcttgtacacagcatttccccctcttatttatgtggcttattaacaattaaagtataacgtataggaaattttgaattcaattcatagttaaatccgtatcttaaaaatacttatctacattacttttacccctattttctatgtaataacgaatacttagctgatttatgttaataaaatacgtcaagactattacattttcattaatattgacatagacaatttatctctcggcttgtaatatgtataattgttactaaaagatattttgcttgttacctaatggaggttacatataatgaagaacaataaaatttctggttttcaatgggcaatgacgattttcgtcttctttgtcattacaatggcgttatccattatgctcagagatttccagtctataattggtgtcaaacactttatatttgaagttacagatctagcaccattaattgctgcaatcatttgtatactcgttttcaaatataaaaaggtccaacttgcaggtttaaaattctcaatcagcctgaaagtaattgaacgtctattgctagctttaattttacctttaattattctaattattggtatgtacagctttaatacatttgcagatagctttattttattacaatcaacaggcttatcagtacctattacacacattctgattggacatattctgatggcgttcgtagtagaattcggattccgttcatacttacaaaatattgttgaaacgaaaatgaacacgttctttgcaagtattgttgttggtttgatgtattcagttttctcagcaaatacaacttatggtacagaatttgctgcttataacttcctttatacattctcattctctatgattcttggtgaattaattagagcgactaaaggacgtacaatttatattgcaacgacattccatgcttcaatgacattcggacttattttcttgtttagcgaagaaatcggcgatctattttcaatcaaagtcatcgccatttcaacagcaatcgttgcagtaggatacattggtttaagcttaattatccgaggtattgcatatttaacaacaagacgaaaccttgaagaacttgagcctaataattatttagaccatgtcaatgacgatgaagaaactaatcatactgaggctgaaaaatcttcttcaaatattaaagatgctgaaaaaacaggtgtagctactgcatcaacggttggtgttgctaaaaatgatactgaaaatacagtggctgacgaaccaagcattcatgaaggtactgaaaaaacagaacctcaacatcacataggtaatcaaactgaatctaatcatgatgaagatcatgacatcacttcggagtcagtagaatcagcagaatcagttaaacaagcaccacaaagtgacgatttaacaaacgattcaaatgaagatgaaatagagcaatcattaaaagaacctgcgacttataaagaagacagacgttcatcagttgtaattgatgcagaaaaacatatcgaaaaaactgaagaacaatcttcagataaaaacaaataataacaaagcgcttgctagtacctcttaaaaagatgatgctagcaagcgcttttctatactatatattatttttctaaaattttaacaccctcttgagtgcctacaataacttgatctgccatatctaagaagtatcctgtctcaaacacacctgtcagatgaattaaatactcatggaacttatatgggtcaattccttttggtaacttacaatctaaaatataattgccattatcagttataaatgcgacatcttcgtttacacgacgttctacttttatatcagcgtatgattcaattttacgtaatatgtgataccagttaaatttatccacctctactggtaacttaaacgtctcacctaagtattgaactattttcgtttcatcgacaaccacaacaaaacgcgatgccatttcatctataactttctctctgaacagcgcaccaccgccacctttaattatatttaaagatggatctacttcatcagcaccatcaattgctaagtcgatatgatcaacatcattgatttcacatattttaatacctaattcttttgctaaaaatgcaattttattagaagtgcatacacctgtaatattgtaaccacgttctttaattagttgcgccatttgaggtaagagtaattccattgtacttcctgtaccaattcccagcgtcatgtcaccattgatttgacttaaaacatcatttaatgtcattaacttgagtgctttgacatctttcatgaaggtagcctcccatatttatgtaatctattcaattcatattttacatgactcgtataaattaacatacccttatttctaacatttttttaaacatatcaatcagaatttacaattctaaaaatgttttatagtacaatatattttaaataatactcgttaaggagaatgatatgatatcaattcacgcaatttcgacaggaaaaatccaagatttgccttatagctcgaaaagaccgatgcgctctgctttagataaaactaagatttcacaaacaacatggttatcttcaactggtttcactggtgatgaacaggcttataaagatcatggtggaccacataaagcagtttgtgggtttagtaagcataattatgcactgtatcaagatgatttacctacactacctactcatgcgatgtttggagagaatttaacatttgattatttagacgaatctgatgtttactttggtaatcaatatcgtttaggtgaagcgttaattgaggtttctgaaattagagaaccatgctggaaaattcaagcaaaatataatattcctgatttagtgaagcgcatgtctacatctggtaaaacaggtttctatttccgggtattaaaacaaggctatgtatctccaaatgatcagctttacttaatacaagaagcaccaatcgaacatcgtttatctgtacaacagcttaatgacctttattataatgatagacaaaatcaagatatgttacgatatgcactaaacaatccatttctgtcaccaacaagacgcgataaacttcaaaaaatgtataacagaacattgaaataattacctttcattataagtgttaaatgaacttttcaaaacaaaaaggaatcaacttacacatcgtttgtataatagtcttatctataaccactgatgctattgattccttttttatgttatatattttctttatttcaaactgtatattaatgatgtcacttcatttgatacgattcttgataacctattcaaaattccgccaaataacataaatattatataaatgccgatacttttaatcattttctactttttcttcgatacggaaacttgttttcgaattgaacacttcaccagcttttaaaattgacggtgctttttcaccatataaattaatatcatttggtaaaaattgtgtttctaatgtaaagccagaatgtggtttataaatattaaatggactatcccactcatcaggctggttaaaagtaaagaacacaacatgaggcatatctgtatcgacctctaacataaattcatgattttcaacatacattttatgttcaccaactgtaaatgggtgatcgagaccaccaaaacgtgtcatttgttggcttaattgcgcatgttgtgatgtaaaaatatcactcaattttatcttgttatcttcaaacacttcatgtaaatctagaatatcacctgtaacaatatttcgctcatctaatacatacatatctaattgattacttgaaatgcgatgattatcaacgacattattatctcgattcaaattgaagtacacatgattcgtaggactaaacaatgtgtcttctgatgcaactgcttcgtattcaatcgaccattggtgatccgcatcataaatatgtgtaatcgtcacatcgatatcacccgggaaatgatcatcagctgatttcaacaccgtcttaaatataactttaatttgagcaatttcatttctaatttcataatcaaataacttattgtccaaaccatgacatccaccatgtaaatgatgttcaccgttgtttttttctaactgatattctttacctttcaacttaaatttagcattatcaattctaccgctatatcttcctatagaagcaccaaatttaaaaggattactatgataaaattcatccgcttcaacaacatttccaagaacaatattattatcatgatatttccaagacactactcttgctccataattcgtaaaaataattttagtttcatcattatcaattttgattaaatctacaccttgtctttggtgctcaacttcaactatcatttttacttctcccttctaaccacaagtgttcaagctctgctgggtagcaacattactaaaacacctacaatacaaatgattgcaccgataacatcatatttatctggcatttgtttatctacgaccatcgcaaaaatcaaactcatgatgataaatacgccaccatatgctgcatatactcttccgaatgatggaaatgattgaaatgtcgcaatgacaccatataacatgagtatcgcaccgcctattagcccaacaagtgaagactgtccttccctaagccacagccaaatcaggtatcccccacctatttcacataagccagctaatataaatataaaaatcggatataacatgaaatcactccatcacacatttgctatcaataatctatcggctacatatcatttgtttacatttcttcttacttcacattcccattttaaaaagttcgttttcacattcatattgtacacttttttagacattattctatagctaaatataaaaaaataagagtaacacgctttcatcatcattttatatgataaatgtgtgtcactctcatcaattttattttttaaatacacgtttcattgaattaaataagccacgttcaaatgtaagtactgaatctttatatgttttaattgcaatccatatcaagacagctaccattacaattgagattaaagaacttaagatgacctcatatatttgaagccctgaagtttgagcgcgtacaactaattgaaatggcgctaaaaacggaatataacttgtgattaaagcaagttgtccatcaggattatttatcgtgaatatcgcgatataaaatgcaatcataccaagtaatgtcagtggcatcaaagattgatttaaatcttctattctagatgttaatgatccgaggatggctgcaagtaatacatacgccgtaattccaacaatactacttataattccgacaataataatttgccaagacaattgattcatttccacgttaaaaccttgtagcaagtcttttaagtcaaaggcaaaaatgcatataactgccatcaatacaattaaaataatctgagtcacggcaactgctataacgcctaaaattttagcaaaaatatgttggattggtgaaatacttgtaataatcatttcaatgacacgcgatgttttctcactagcaatttccatagctatttgagatgcataatttaaaacaatgaagaacattagaaagataatgccataagctaaagcatagttgaaaatcttttgtccttctgatactttatcgacttcatcattagaaatcaccttattatcaactttactttgtgcttgtaatttttgtaagtcttctttgttgatatttaattccccggctaccatatttgtttgaatagctgtaagcagtgcttgtactttttgtgaatcttcatgacttactcgcttctcactaatgattgtcccttgtaacgtgcgattttgattcaccttgataatataagctttatcaagtttatgtttttttacttctttttcagcatcttctatagaaactttagtaaacttagcatcactatgaaatgtattcgcctgttgcttgaaaaccttatagatttgttcattcggtgctgctacaccaattttatctggaccatcatcaaacatgttaataatcttatcaatgttagataggccaatcattaaggcagcaataataatcataaaaattacaaatgatttagctttaatttttttgatatatgtcaaagtaaatgtcgcccaaaacttatgcatccttgccaccaaccttctcaatgaatatatcttgtaatgatggttctacaacttggaatcgtttaacataaccttgatgtgccacaacttgataaatatctttggctacgtcttcattctcaatcgtcaactgaagaccttgcttcatgttttcactatgaatgatgcctctaatgtttgttaaatctggtagtgttgtttctgattcaatgacaactttcttgttaccattagatgcacgtacatgattgatatcaccagaaacaacaagttgacctttatctaaaatacaaacatcatcacataattcttcaacatgctccatacggtgagaactataaacgattgtactgccccaatcatttaagtctttaactgcttcttttaataactcaacattaactgggtctagaccactgaaaggctcatctaatattagtaattctggtttatgtaacatacttgctaacagctgaattttttgttgattcccttttgatagactatcaattcgttttttgcggttttcagtaatatcaaaacgctcaagccaatacgatatttgctgttgtatttctgtttttgacattccctttaaagttgccaaatatttcaattcttcttcaactgtcaatttcccatgtaaaccgcgttcttccggtaaataaccaatacgattgtacattgttttatctagttttttaccgttatacgtaatgtgtccttcagttggttcacttaagcctaaaatcatacgaaatgtcgttgttttacctgcaccatttcttcctagaaaacctaacattttacctgattctaactttaatgaaatatcatttactgccgtcatcttgccaaaacgtttcgtaacatgttcaattacaagtcccatactttgcctcctaaaaaaatatgtatttatcttaatataacatttccattctctataaatgcaatatttttaaaatgaatttatttttaaaatttctgaaattgaaaaatttaaatagtgccatttttgcatgttaagtatcattagcactagatatgttttttccatgcctttattgccttatttgtaaaaaaatatcccagcatcattgtgccgagatatttatatcattacaattgattatctgtttcttccggtgttttcggtgtttcagatgtacacgctttttccggtgtttcagatgtcactggttgatttttaattgtagacgggtattttgggctttcgccatatttatttgccggcttactgtcaaagcataggaatactatcataacaattgttaggcctaaataaacaaaataaagaagtactaacaaaatattaagacccatcggcattaatgtaaaatcactgtcataataactatcgataatctgtaatactatataaaatataatactgaatactgtcataatcattggaaataacattgttcttgatatatcgtgaaatcttcgaacgcacaacgctaaatttggaataaacgttgccaaactatagacaaaagtatacacagatgtaaggataatcatcaatatactcataactattaatgtttcgttatccgccgctatagaaataaagaatagaaataggtttattattagcacacacacagctggaaccataagtatcaaatgccatagtgccatataccaatattcactacgtcttgatctccccttaaaatttacataatttttccaaaataaaacgaatgatttcataaaacctacttgaggtaattgttccattgtaatctccctttcgttaatcatatttatatttttaattattgttaccgttataatttacaagattcattatcaagccacttcatttcaatcgtcaatcactttggaaaatgaactttatatttcatcactagtaaaatgaaaacccgctacaagtacacatctatatggagactcatttgaaagtcaacgcttcgttaactatactaaaaatatgtcatactgcaatgttcacgtttaaaagagtctcaatctatgcaaataaaatattccataacaaagtatatactttacatttttataattcttaacaatactattttatcaaacatttaccacaataaaaatatctttttcatttttatttaaattaatcatataattgcgaggagaatattatggatttcgttaataatgatacaagacaaattgctaaaaacttattaggtgtcaaagtgatttatcaggataccactcaaacgtatacaggctacatcgtggaaacggaagcttacttaggtttgaatgatcgtgcggctcatggctatggcggtaaaataacacctaaagtcacgtcattatataaacgtggtggtacaatttatgcacatgtcatgcatacgcatttactcattaattttgtaacaaaatctgaaggtatacctgaaggcgtacttatccgcgcaattgaaccagaagaaggtttatccgctatgttccgtaacagaggtaagaaaggctacgaggtaacgaatggcccaggaaaatggactaaggcatttaacattccacgggctatcgatggcgctacgttaaatgactgtagattgtctattgatactaagaatcgtaaatatcctaaagatattattgctagtccacgaatcggtattccaaataaaggtgattggacacataaatctttacgttacacagtgaaaggtaatccatttgtgtctcgcatgcgtaaatcagattgtatgtttcccgaagatacttggaaataaatgccatctttcattgattactatcatgaaaatgaaatctatctccttataagtcaatcaatcgtgccgtcaacatgcggatgggttgattgtttttctttgtatccatcatattttttgattcatctcctcttattgaacttgttcttaattataaaatataacaatagaattatttataattattaaatttagatgcattaatattattgatattattttcaaaaactagaaatattgatttgttgcatgtataatgttaaaagcgcccttttataacgcttacatataaaagcttatttagggagagggatattcaacaagggggatttgaaaatgatagaacttaatgcaattacaacattatgtttagcttgtatcctttatttacttggtaaggctatcgttaatcacgttaattttttaaaacgtatttgtataccagcaccagtgattggcggcttaatctttgctattttagttgcggctttggattcatttggcatggttaagattaaattagatgcttcattcattcaagatttcttcatgttagcattctttacgacaatcggtcttggtgcatcattgaaattatttaaattaggtggcaaagtcttgctattatactttatgttttgtgctatcatttcagtcattcaaaacatagttggtgtatcactagcaaaagtattaaatattaaacctttgttaggattaacagcaggttccatgtctatggaaggcggtcatggtaatgctgctgcttatggtaagacaattcaagatttaggtattgattcggcactgacagcggctcttgcagctgcaactttaggtcttgtatttggagggcttatcggtggtccagttgtaaaatttttaatcaaacgttataacttaaagcctcaacatagtgacgatacatttaaagattatagccaagtagcatataacgaacatttacatagtaaatttaatgccactgaagtattcttcattcaatttacaatcgttgtattctgtatggcagttggaagttatttcagtcatttgtttacagctcaaacagggattaatgttccaatttacgttggctcattatttgtagctgttattgtccgaaatatctctgaaagttttaattttaatattgtagatttaaaaattactaatcaaattggcgatgtcgcattaggtattttcttatctcttgcgctaatgagcattcaattaatcgaaatttataaacttgctatacctcttattattatcgttttagttcaagttgtcgttatgattttatttgctgttttaattttatttagaggtttaggaaaagattatgatgctgcagtaatggtaggtggttttatcggtcatgggcttggtgcaacgccaaatgccatggcaaatttagatgttattactaaaaaatatggaaactcacctaaagcatatttagttgtacctattgttggtgcattcttaatcgatttaattggtgttatagtcattatgggattcatacaatggtttagttaaacaccaaactcataaataaaagaggaggccttcgcctcctcttttatttatcctcgatgtatattcaagttacgttgttctatccatgacaatatttccggactaaatacgatttgtttttgtgttaagtcgtcaatatttttagcatctaacatcgtcattattgatttcatgtgttcaataaatgattctacataagctactgtatgtgcaatgccattattttcaacttgatttaaaaacggacgtgacataccagttgcctttgcaccaagtgctaaacttttaattgcatcgagtggtgtacgtaaaccaccactcgcgaaaactgaaatttcgctttgataagccgttgtttcaagtaatgactcaactgtagactgtccccatgatgataagtaatccatatctttatttgcacgacgttcattttcaatatctacaaagttagtaccacctttgccactaacatcgacatacttgacgcctatttgttgtaagtcatgcattaattctttgctcataccaaatccaacttcttttataatgactggaacagacactcgtgatacaatcgacgctatattatctaaccaagtcacaaattcacgattcccttcaggcataactaattcttgaggagaattaacatggatttgtaacgcttgtgcctcaagtaattcaactgcttccaaagccttttctactggtacgtccgcaccaacattgctaaaaatcatgccttcaggattcatttttcgcgcaatcgtaaacgtctcagccatgcgtggatttctcaatgccgcatgtgttgatccaactgccatcgctaagccagtttctcttgcaactacagctagcttttcattgatgtttttcgtccactcgctaccacccgtcattgcattaatataaaccggatatgccatcgttaagtcaggcgtctgtgatgtcaaatcgatatcatttacattaattgatgggatagaatgatgcacaaaacgcatcttatcaaaatctgaatgcattgcgtcagattgggccattgctatttcaacatgttcattttttctctgttctctttgaaaatcactcatgattaaacctaccttttcgtcatttctaatttaaaaccattttttacgtctgaaaaagatgattaatacgacagctataacaaacattacagctaagcaaatataatatccataatgtaaatgtaatgccggcatatttacaaagttcataccataaatcccagctatgaatgttaacggtgaaaatataactgatactaatgtcagtacttgcataatactattcattctaaatgacgtgtatgactcaaaattttctcgtatttcgtttgtcatttcttgagcagtacgaatgatattacgttgcttaatcaagtggtcatcgatatgttgaatgtatagcgaatgtttattatctataatcaaatcaccattttgtttcattgtatcaattagctcttgcataggaaacagtacacgttttactttaatcaaatccgaacgtaacttaaagacactatccatgaccattttattaaagcgatcatctacatggcggtcttcaaaatgataaacactatcttcaagtgcatatacaaagttgaaatatttatcaaccatcatatctaaaattaatatgacgacatctgcacaatctaattctgcatctaatgtattcatatacttatagactactttatttaatgattccaacgtttgatgatgatatgttactaatacattgtcttgtataaaaatatttagtgctattggtgaatagtttgaccccataatactatggaatactaagtattgataatctttataagatttatatttagctcgtggcataccgttaattgcatcatccacttctaaatcattaaaattaaaatgtgctttaaaccattcattttcttgttcattcggttcatcaaaatcataccaaacaatagtcgcatcttttggtatctctttgatatcatcaactactttaaacggttcatatgtagtttgataccgtatctttaaagccatcgatactccccctaaataacgaattctctattattttatcatgaattaaataacgtgtatgtcttaatttattttagtatgatagtcactaaggagatggttattatcaaacaactttttacacatactcaaaccgtaacatctgaattcattgaccataacaatcatatgcatgatgcaaattataatatcatttttagtgacgtcgtgaatcgttttaattacagccacggtctttctttaaaagaacgcgaaaatttagcatatacgctatttacactagaagaacatacgacatacctctcagaattgtctcttggcgatgtatttactgttactttatatatttatgattacgattataagcggttgcatttatttttaacattaactaaagaagatggtacactagcatcaacaaatgaagtaatgatgatgggaattaatcagcacacacgtcgttctgatgcttttcctgaatcattttcaacacaaatagcacactattataaaaatcaatcaactatcacttggcctgaacaattaggacataaaatagcaattccacacaaaggagcattaaaatgacagatgcattacaacaaaagattcatatcgaattactagatttattagatgatgttaagtttgaattaacagaattaaatgcacaaaaagggttatacattaacggaccagcaaatcagctacttaagcgtggcgtgcatatggcttatgttcaaggacaaaagcaagccatcgataatattatgactattgtggaacaacagcttgaagatcaacatttcctagaacattatgataaatttcaaaatgaggttgctcatcgcaattatgataaaacagctaactttgcagaacttagtgatattccacgtcaattcgataattttttagatcaattttatcaaattaaagggcaatactttatcatcacacatatcaatacacttattggtgattttcactcagaagctcattaacaattagtctatataacccttgctatattttcaaaaacaaaacccaattacgttttcatgtcaaatatcatcttgcatgaaatcgtaactgggtcatttatatgttattagttattttgtgttacatcctcatctatcgatttggcaatttgtttaatagctttatgtgattgtctaattggataaattggaaaatcatgtaccatcttaggataatcataaaactcaatgtattgatgatgttgcaacatcatttgttcaaatagcttcatatcaggatgtgtcatttcacgtccaccaccaaacatataaactggtggcaatccttctattgtgccattaattggcgatatgcgcttatctgttaatggtaggccattcgcccattttttcataatctcattgacaccaaactgacttagaaccgcatcttgttcgattaaggcgtccgaaatatctttattagatagtgttgcatctaaaattggtgagattaaatacaatttattcggtaatggctgttgattatctaaaagagattgtacaaaggataatgccagtgcaccacctgaaccatcacccatgactacgacattttgatgtcctacttcagatactaattgatcataaacacgttgtatcgcttggaaagtatcgtcaatatgaaactctggtgtctttggatagataggcagtacaacctcatataatgtacttaaagtgattttatccaacaatctccaatggaacggtgatggttgtagtgcattgaatccaccgtgaatatataaaattttcttatcaatttgatgtctgaaattaaagcgaaagacttgcatatcatctaatgacaatttttctaaatttgctttaacatttaatgttgaaggctgcttatgtttttttctattttcaatttctcttttataaaaaaatctttcaacatcttgatcatttttaaacataatcgagcgattgtgaagcaaatatttattgacaacgctattcataacacggtttctaatcaatgtcttaacctacctttatatattttatgtatccaatgattgtctatcccctacattctttgccaaaaaaagtatataatgtagaagatattttctttttcactttcaaatttaagactacaattgaacagtgatttttcatcattataacagacaactagacatattgataagtaaagaaaagaactttatacggaggtaccttgcatgacaaatccaaatcaacgattagaaccatttgatgagacatttcaacaaccgaatattcatcgtggtaagcgatatggtaagaaaaaacgttcattggtaagcatgattattcaaatcattgttgttatattaaccgcaatcgctggatacagcatgtggaaacaacccatttttaatattgtcttcaccaaagaatctgtagattttgatggcattaaaaattttaacgagacaattggaaaaatgcatcaattaaatattaatttgggtaatatcaatgatttacaacaaggaatcgatcgcttaattttagtctttaacggtttctttattttatgtatcgttagcctagtcataacaatactgacaattgtatttaatcgcacagttctaaaagtagtaaatattttagtgttaacaattatgttagtcattacattgtatttcagttatattattaaagcactcgcacaagaaattgcagatgttttcaaaaaatattatttaaatgtaccaccagatcaagtgattacagaagctgacgctattcataacggcatcattttacttggctgtagcatcggtttacttgttataagcttattcttccgtaatcgcatgcctcgtttaaaataatgttatatagtagggattgggacagaaatgttattttcacaaaattcatttcgttgacccacttcctgctttttctttattaatgacctactacgtcaatgccaaattttaatataattcctctaacattctataaatcaacaaataaaaaaagtatcgataaccatatttggcaccgatactttaaaaatcatgtccccacaacataatttttgattagtcacacttcaattaatttattttatttattcatgattgatactattatctgcatctaacttttgagctgtagcttttgcttttttattactttgtaaaaataaacataaaattaaggcgatgatgctaaatatcgttgcaactataaatgcatcattaataccttcaaccgttgctagtttatttacaaattgtagtaacactttcattgcgccttcttgtccgccatattgtgatgctaattcatgcatatgatcttgtacaacaggattcgttttatctaactcttccccaaaagctgataagtgttgtgtagtttgtgttgtcattacagtaactaagattgctgtacctatagagcctgctaattgacgcatcgtatttaagaaagcattaccatgagaggcaagtcgtcccggtaacgcattaatagctgcagttaccattggcatcattataaatgccataccaaatgaacgaagtacatagatacccatgattgtcatatatggtgtatccatatttaatttagttaattcccatgttgcataagtcattacagcaataccaaagatagctaatggttttaaaccaatagtatctaacaatttacctgcaaatggtcctagtagacccataattagagaaccaggtaataataacaatccggaatctaatgctgagaatccgcgtaaattttgtaaataaatcggtaataaaatcataccaccatataaacttaacattacaaccatattaataattgttgttaatgtaaatgttgggaatttcaatacttctaaattcaacattggtgatttcattcttaattctctaataacgaatagaataataaagataataccaatcgcaaacattgtttctatctctactgaaccccaacctttgttgccagcttctgagaaaccatataacaaagcaccaaaaccaatcgtactaaaaatgatacctgggatatcagctttagggtttgttgtatattgatataacttaaaccatacaaaaccaattaaaatagcgataatcccgataatgaacataccgtaaaacatcacattccaatggtaattttgtacaatataacctgataatgttggaccaattgcaggtgctaaaatcattgcgatacccattgtacccatggcagcaccacgtttttcaggtggataaattgtaataataacaattgaacctaatggcattagtacacctgcaccaatggcttgtaatacacgtccaaccatcatgattgggaaattcattgaaatcgcacagattaatgaaccaattgtaaagagtactaacgcaactaaaaataattttcgatatgaatatttattaaatagatacgccgtaattggtattaaaataccgtttactaacatgaatcccgtcatcaaccattgccctgttgacgcagaaatattaaattccgtattaatttttggtaaagcaacatttaataatgtttggtttaaaatcgcaataaacataccgaataataatgccgctaatattttaccgcgtgaaacaccttcaccaaaaataaagtttttatgttctttttttattttttcattcactttatattcttctgattcaggatttttagcagcaactgcttcctcatccttattattagtgaatgcttcttgatctttctcagacccctttgtgtaaccatttagactaacttggctatgatcatcttgattgtcaacacgcaactcttcatgcgtcatacgttgtgtcgattgatcagttgttttgtctaaatcactagctttaaatttagattgatttgattgacgtgtcgtaaattgttgttccttttgttggcgtttgcctttttttcttgatcttattaaaaataaattgataaccccaacaataatgagcgctaaaataatgtagctaataatgaaggtcgtagtcatttaatgacccccttaatttttatggatttttacttcagcgttcattccaggaacaacttgtttagacggttctgattctagagtgattttaacaggtattacttgagaaactttagtgtagttaccatcactatttgatgatggcattaatgaaaagcttgcagcagttgcttttccaatactatcaactttacctttaatagaagctttttgaccgtcaatagtcacatcaacatctttacctacttcaacatctttaatatctttttcgtcaatatttgctgttacatataaatcatctaaattgtatgcataagcgattgggttaccagcttgcaccattgaaccttccataccatctaatttggcaattgtacctttttgaggcattttaagatccatatctttcgtttcgccatcttgaccttgtacagtaacaattgctactttgtcacctttatcgagtttgtcaccttgtttaacattaagtgatttaatttgtccagatgcaggacttgctattttaatttgatcgccatttacttttgcattatcagttgttacatagcttgttgttttattccaaaaataaaagccagcaatcccaattgctaacagtacaacaaccgtaatgacattaattaatatcatctttttcatgaaacatttcctcctatttgcttttaaaattcactttatttattatagagacatgataactaaaaaaacaccaacaatttttataagagtgttggttaaaattcacaaaggtgtaacaatatgaaacgacaagccaaaatagaaattcaaaacgcacttgttgatttgatggctgaatatccttttcaagaaatatccactaaaatgatttgcgcgtattgtaatattaatcgttctactttttatgattattacaaagataaatttgatttattggataccatcaactcaaagcataaggaaaaattccaatttcttctaagcgcgctacatcataatttcgaaaatattaaacaggataagcttaaactttataaattcttcattattattgctaagtatatcaagcacaatgagcagtttttcaaagacattttagttacctatccaatgaaaacattattcatagactatataaatttagcgagagattactatcaacaaattatgaatgactatagtactacagtaaccaataaacagctttatgttacatatatcataggcggtcaagctggggtgtttattaattggctttcgaatggttgtaatgaatcacctgaagaagttgctgacattttattggctaatacgattaaacttcaaaactaataatacggtttcattctaataaagaaatgctataaaacaactagataaagttaaaccaaatggatagataatagtacatatgtaacggtgctatcaatataaaaatgccgagatttccacataataatctcggcatttttatttttgatgctaaattcataggtctatgaatagctcaagttttgttttttaatttttcaattcaatataatagaagaaactatgtttatcatcgatttgttttaaataccttcatattataaatctgtaaaataattaatataactgctgtagctataataataattatgtaaggtataggattatcttcaccttttacccccactaatggcgatgcaacaccaccaaataaaaactgtactaaacctaataaacttgatgaactccctctaccactactactttcatccatagctattgtaaaaccaagtgtcgcaacacctgtcactggtgctattaaaatgataaatcctatcgctaaaatccaaaagttccaatgattaagcaatacaatcgtcactaaaattacaccgataatctgaatcatcgtcatgcctctcatcaatttttgtgagtctataaaatcaacaaggtacccagtaagttgacttgatataatgagcgtaataccaattcctgcaaacatccaactaaattgtattgcagtcatgccataaattttttgaataataaacggagacgcagaaatataagtaaataatattacaaatgtcataccttgaatgagcattggtaatacaaaacgtggcgtcttcaataatattttgaagtttttaaacattgtctttaatccactacttgactcacgatttgtcactgttaatgattcaggtacttttaataaagaacctatgaccatgacgaagccaaagatagtcagaatgacaaagaccatacgccagacagaataatttaaaattatgccccctattgttggcgcaacaactggtgcaataccattaacaagcatcaataatgccataaacttagttagttcattaccactatacatatcacttgctatagctcttgaaataactgctgctgcgccacctgtcactccttgaagaaatcttaatgcaaccatcagccaaatattatgtacaaaaacaatacctaaacttgctaatgtaaaaataatcatagctataataagcggctttctgcgcccagttgaatctgaaattggaccagcaaacaaattaccaaacgctaaaccaatcataaacatcgataatgttaattgtgcgttagacgtcgttgtttgaaaatcatgtctaatatctggtaatccaggcaaaaacatatctatcgataatgctccaatggccgtcaaagatcctaaaataataataaatatcggtgaacgcttgttaaaatgcgttaaatcattcatatgactatctcctttatataatgattagtttataactatcacgaacagaaactaaatttaaatatgctcttttatatattagcattagtcacaagtttcatgaacatcattacaacttataaaaggtataaaatgatataaacctcagcacttcataaatttttccacaaaaaacaatcccttcaaagtaattcacactaattgtaaatactttgaaaggatgttgtttgtattccatgacacatgcatcttatttaagttttatactctatttttctgatgtcttgattaattgcaagcggtcttgcgagccttgttcaagctcatattctttatctacttgcttaccgttttcatttattaatcttacggttgcggtaatcttatcaccatgtttttcagcatctataatttgtggtgaactaatcatcattaaacttcctttagatacacgcttctttacatcatcataaaaagatgatcctttttttatatatgatgatacaaaatcaaaatccgactgattaaacgcagcattattcgctaaagaatatccagcaaagaattctatcaatttgttcttcaagctgttttcttctttttctttcttttcaacatagtcttcgatatcttcactgtcaaaattcaaagttatctctgtattgtattttaaatcgctagctttaatcgtcttcgtctgtgttgtaaatgttttatctttcgctttacctgaagctgaaatggtaatatctttattttgtggatatggaccatacgttttggaacttgaaaatgccatttcatggtcatttatagttacttttttagaactatcatttaattttgtatcgccttttaaagttacagatatatttgcttcttcaaaatcttcagtaacatctaccgtttcagaattactttgtctaaaatcaaattttaaatggcctgcaaaatcaccgttctcagttgatttcatagctggaattctatatgtccccggtataaaattacctattggcgtcactttatttgcttcagctataaccatctttttcttaccaccagatttaaactcatattttgttttttctttcggtttaacaattggttgcttggtaggtgcagtaaagctcatattatcgaaaaagatataacgtgtgccatttttacttacacgtaatatattttgaccagatctggtttgaatataagaagctacgctggtcttactcttattcaatttatgtaccgtatttttaaggtcgctgacaaattgcttaagcccaacttcatctttgatatagttaatgtatacttttgcttcttcagaatctactttattatctttagtacttaataatgttgctactttttgtttatcattattctcaatcgcattcactaatattttagtttgcgcttcaggtgaattgaagtttcttagtaaaaagaacaatataataattaagattaaaatgaaaaaaccaattgcccaaggcaccatttttctcatcttgatgttattagtttgtatatcttcatcggttgactttctatataatgcttgacgactatcaaatttatgtccacattgtgtacatatctgtacatcatcttgtgcttgttgtccgcacttcgggcaagatttcatactttcacctcaattctgttcctcttcaattgttatatgtatatcacaaaaattatttcattattttaccattattattttacaaatattatcccaagaatacaattcaagaaatgattaactttactttagaattgtaccttattacattatttatgaaagtactctctcaattataactaaaaagaaggtgttcaatacatacatatttagtcttatatttgaacaccttcaaaaacctatttatgattgctatatgttttaatgcgatgattgatgacttctaatacttgccttacattttcaatatcttcagaatttaaatcattagtaatatcttgcgcaatatctgtcataatcgcattacgttctttcaaatatgctctacctttgtcagttaaggttatgaatttcaaacgttgatcaatatttaaatttggtttatctaacttaactaatttagcatcgattaactttttaattcgtcggcttactgcggccttatttacaccttgtctttgcgtgatttcactaattgtcaaaggttctttatttaacatacctaatacgttagactgctctaatgaaatttcatattcattttgtaaatctttcaacatttttgcagttaatgcgttaacgttatttataaactgctctaaaaattgaatatggtcttgtaaatgttttaccataattatttctccctaattactatttttataaagtatcctcagcaatcattgtatcgcacatctaaaaaacacaaaaatattgacccatatataatataacaaattaagatttacatgttgctgctttctccttgctttaataaattaaatcatctacatttatatttaatatttattataagcgaggtgtcagtatgttattgaatttattattaatatttatacttatcgttatttgtccgttaattttcaactatactctgacgttaaatttaacatgctacatcttagttgtcatatcgatatttttgtcactcatctatagcatcatgacctatactttcccttggtctatgtttgtaacatttataataatcagtattatcatgctattcaaacatagatatttattttctcatacttctagtcgcttatttattaaaaaattattatctttttcatataaatttgtactctacacatcagcacttctatttataagtacgattcagtcacctattgtgaaaggtttgtctatgtggttagctatattatgtctttccctgttactaacctttatttgttatctcgtttggacagtatcatatagacatagatcatacaacaaagaagttgatatcataattgtgttaggtgctggtatttttaccgaatttgtcacaccaatgcttgcagcgcgtttagatcgtgcacttgatatctatcaacaacaagcatcagcaacaaagatcattgtatctggcggacaaggaccagacgaaccaatttctgaagctttagctatgcaacgttatttgattgcacatggtgttgataaaacagatatactaatggaatctcactctataaatacatacacaaactttttatattctaaacaaatcatcaacaatttgtatcatgaagcagttaaaattgtttgtgtaacaagtcagtttcatgtattgcgcgccttacgactagcccaaaaattaggtttatctatcgatggtgtcggaagtcatacaccatatcactttttcttacatgtgctcatcaaagattatctaggcgtaatgtatcagtatagattgttattaacgttatattgttcaagtagttggtttatatgtctttacgccgcttttatttataatagttaatccacaaacaaactattattataggttgtttctaatattgcgtcaaactatctttaaatattcgttaatccttgattagacaattgttatattgaaaataaataaactaaagagtctgggacattaatccctaaaaaaaacagcagtaagataattttcaattagaaaatatcttactgctgttctctatttatacaatacttcgtattgaatggcttcgctatgcccatctggcacattactgtaaaattctataaatagaatttttgatgacgggtcccttcctagggtgccgtctcagccaccccaaccggcacattgttgtaagctgactatatgtcagcttctgtgttggggcccctgtcttcgactggcactgctccctcaggagtctcgccattaatactacgtattaacatgtaattttacttttaaatactttaaaaaaataagacactttggccaacttaagccaggatacaatttacaaatagcgacaaattctcaatttgttttatcctatgacctatttcaaaacccaacagatactagaactttaattccatttttaacaatgattcaaaataccttcggttatttaccggagtatattgtagctgatgcatgttatgatagtgagcaaaactatatggctattatagatgattttaataaaacgccacttattacgtatgtcatgtttattaaagataaaactagaaagtttaaaagtgacatttttaacactcaaaattggaaatatgacgaacttaatgatgaatttatatgtcctaataacaaaagaataggttttaaaagatatgcataccataatgatagatatggttttaaacgtgacttcaagctatatgaatgcaacgagctgtacattataaaatacatatcaaaaaagctgatttctatcaaataattaatagaaatcagcttttttacattgcctaagaacttaatgtcccagcctgttttttgtaaacccaaatcgtattctgttatctaacttttatactactatgtcttaaatcattaacatttagcgtctttacaagccactaatcagttattttgccatcttctaattcaatcactcgatctgcatattcaaataatcttcgatcgtgtgtaatcataataccaatcatttgttgttctttaatttgttgacgtatcatctcaacaacttttgttgctctatcggcatctaaacttgctgtgggctcatctgctaaaatgattttcggattattcataaatgctctcataatcgcaacacgttgcttttcaccgccagataactgatgcggatatacattcaagcgatcttctaaaccaatatttttcaaaagttgtattgctcttgttgaactttgttgtttggtcattcccgcttcttgacctacgagtgtcaattgctctatcacttttaaataaggaactaaatgtgaagattgaaaaataaaaccaatatcttccaatcgtaaatcactaggacgatgctgtttatcaaacaatggcgcatcattgtaaagcactgtaccactcgtttgacttaacaatccgcctaatatcgttagcaatgttgttttcccagaaccagaggcaccatttaaaatgacaaattccccttgttccacttcaaaattaataccttttaaaacttttgtttcagacaaaccttctccgaaatttttgacgatatcttcaacgactaatgccattattctgcacctccaattgcttcgataggatccactttaaataatttgataaatgatagtgaggcacctaaaatcgctactaatataaatatccccaccattaataaaatattttgcgttgttaagtaaaaaggcatcgttaccggcatcataaatgatagtcctactatgatgatcacagcaatacctaccccaattattgttagtgttaaaatttgtaaaactaacgcactcaataaatgtcttgtcttaataccaattgctttcaaaatgccaatttgtgatattttttgaatcgtcataacatagaaaaatgcacttagaacgattgctgtaatagcaaacaaactaacaatcatcatatttaacggtgcttgctctgcttgataactcgcaatattacctgttaaatctttttcactcacaacttgaacgtcatttattttattaagctcatcacgttgttgttgtgttaaatttttcactggataaaatgccgtattaaccttattcaatgcattaaatccgttatcgttcaatagcacaatggaactatgcgcatacattgtgtcgtttaaaataccagaaactctataactagttgaattatttttaaaatgtaatctatccccgactctaatgttgtctgcagctaacttatcattaatagcgacctcatgagcatttttaggataatcaccttttttaagttgtatgcgttgttgtttaacgtcattcattgtaatcacatcttgttctttattagataatttcaatgtttgaatattcattttatatggttcttgatgaattacctttttaatttgattctgttgcgtatcactaagttgcgatttctcaatttgcggctctttcattttttgaacaacatattcatcattatcaaagtgttcaaataacgaaatattctccctaccaagcccttgagctaaaccactaataaataacaccataatacttaataaaagaatgattaatgtgattaaaatataacgaaatttgtaaaacataatctcttttatcgctaatttcatatcgattcacttctccctatttcttctttagcgtcagtataaggttgaaatatgaactcaatatgaacaattgtttttttacgcaaaaatattttacatgtataataaatgaaaaagataagggagtttatagctatggtgcaatgtcttgttgtcgatgacgatcctcgaatcctaaattatatagctagccatttacaaacagagcacattgatgcatacacacaaccaagtggtgaagctgcattaaaacttttagaaaaacagcgtgtcgatattgcagtggtagatattatgatggatggtatggacggctttcaattatgtaatacattaaaaaatgattatgatataccagttattatgttaacagcgcgggatgcacttagtgacaaagagcgtgcgtttataagcggtactgacgattatgtaaccaaaccctttgaggttaaggaacttatttttagaattcgtgctgtattacgtcgatataatatcaattcaaattcagaaatgactattggcaacttaacgctaaaccaatcctatttggaactccaagtatctaataaaacgatgacgttaccgaacaaggaatttcaattattatttatgcttgcagcacgtcctaagcaaatctttactcgtgaacaaataatagaaaaaatttggggctatgattatgaaggagatgagcgaacagttgacgttcatattaagcgactacgccaaagattaaaaaaattaaatgccacacttacaattgaaacagtaagaggacaaggctataaggtggagaatcatgtttaaaacactctatgctagaattgcgatttattccattacggttattttatttagtgcattaataagttttgtattaacaaatgtttactatcattataatttaaaagcatctaatgacgcgaaaatcatgaagacgcttaaagaagcaagacaatatgaacaatcagctaaaccaacgcacattcaacaatatttcaaacatttagggcaaatgaattaccaaataatgaccattgatcaaaaaggtcataagacattttatggggagccatttagagaagatactttatcacaaaatgctattaacaacgtattaaataatcaagattaccatggtattaaagataaaccattcgcattattcgtaactggatttttcgacaatgtaacagataatactgttggtattaactttaagacaaaagacggttcaatagcagtatttatgcgtccagatattggagaaacatttagcgagtttagaacattcttagccgtcttgttaatgttgttattatttatctcgatttcattagttatcgcatcaacctattcaatcattcgtccagtaaaaaagttaaagctagcgaccgaacgcttaattgatggtgattttgaaacacctatcaaacaaacacgcaaagatgaaattggaacattacagtatcactttaataagatgagagagtcattgggacaagttgatcaaatgaggcagcattttgtacaaaatgtatctcatgaaatcaaaacaccattaacacatattcatcatttattaagcgagttacaacaaacttctgataaaacattaagacaacaatatataaatgatatctataccattacaacgcagctgagcggattaacaactgaattgttgctcttatccgaattagataatcaccaacatttattattcgatgataagattcaagtcaatcaactcattaaagatatcattcgacatgaacaatttgctgctgatgaaaagtcgttaatcattttagctgacctagaatcaatcaatttcctaggaaatcaacgtttgttacatcaagcattgagtaatttattaataaatgctattaagtatacagatgttggtggtgccattgacatcgctttgcaacatagtcacaacaatatcattttcacaataagtaatgatggttcaccaattagtccacaagctgaagcacgtttatttgaacgtttttataaagtgagcaaacatgataatagcaatggtttaggtcttgcaattacaaaatccatcattgaattgcatcatggtacaatccaattcacacaaagtaacgagtatgtaaccacctttactattacactgccaaataattcactttaatctctacctcctgaaaaaacatttctgtttttatttcaggaggtatcttttatattgattagcgctttctagccacttaacatttaatttctaccattcaacaaaatttaaatatatcgatggtcatttatggtttaataattttgaaggaggcattaacctatgatgaaactcaatttatttatcaatgcaaatgagacggaatcttatattgatatacatgcacctaaaatgaatgataacgttcaaagtattattaatgcagtcaatgatttagacaaatcacatacattagtcggatacatagacaaagaaatccatatcattaatgtatcagatgttataacattccaagttattaataaaaatgtaacagccattacaagcaatcaaaaattcaaactaaaattacgactttatgaactagaaaaacagttaccacaacatttcattcgcatttccaaatcagaaatcgtcaacaagtattacattgaaaaattattattagagccaaatggacttatacgtatgtatcttaaagatgcacactacacctattcttctagacgttatttaaaatctataaaggagcgcttatcaatatgaaaaatttgaaaaactcattatttattagcttaatcattggtttgtccctttcactgttctttagtatgttatttgcagacggcaaatattatccactgaacccacaatcaactattggcatattgtattatacgcatttcacagaaactaccgtaatgttgatttctatcattttatggttactcataggcgtcgtctttttccttggagattttatctttaaatacacagattggagcattactaaagcaactataatgcatttcataacaacgtatgtcggattcttgcctttagcaatgcttgccggttggtttccactaacagtgcattatctaatcatattcacaattatcttcattgtggtttatgtattaatttggataattcaattctttaaaaacaagaactacgtagacactattaacaagcaactgaaacaattaaaatgatttttattaaccactaaaaaacggtaatgtctatcacattaaaaaagacattaccgtttcgtttattatttaacttgtaaatacttagttacttcttcattaattttatgatataaatcctcatgatctgttaagcgataaccaaatgacggcaccatttctttaatctttggttcccatcctttgaattcatcacgatagcatctctgtaaaacatcaaacataatatctacagctgttgacgcaccaggtgatgcaccaagtaatgcagctaatgtgccatcatctgacgtaataacttcagtaccaaattgtaagttacctttagaatcctcagtatccttgattacttggacacgttgccctgctgtaatcacttcccaatcttcatttttagcatttgggaaaaagactcttaaatcatccatacgctcatcattagataacatcaattgtgacactaaatacttcgtaagactcatttctttgatacctgcagataacatcgtcacgatattatttggtttaaccgatttaattaaatccatatgtgaacctgtttttaaaaatttaggtgagaaacctgcaaatggaccaaataacaatgaacgcttgccgtctacaaaacgtgtatctaagtgcggcactgacattggtggcgcacccactgctgcttttccgtacactttagcatgatgacgatcaatcacttcttgatttgtacagcgcaggaataatccacttaccgggaaaccaccaatatgttttgattgtttaatcccagtcttttggagtaatggtaaactcgcaccgccagcaccaataaatacaaaatcagattcatatgttgtcgtttcattagtttctaaatctttaactttaactagccataccccagatttctgtttcttgatgtctaatacattctgcttatattgaattcccacaccacgttgctctaaattatcaaataactttgcagttaacgcaccaaagttaacatctgtaccagtttcatcataagttaaagcaattggttcatcagacttacgaccttcaatcattaacggtacccaagatttcatttcttcttcatcttgcgataatttcattttttcgaataaaatacttttctttaacgttgcaacacgactttttataaaagctacattatcttcgccaatgacaaaactcatgtgtggcaccgcttgaataaagcgatctgggttatctaattgtcctgttttaactaaatatgcccaaaactgttttgaaatttggtactgctcatttatcttaattgctttactacaatcaactgtgccatccttaccttcttttgtatagttcaactcgcaaagtgctgaatgccctgtaccggcattattccatacatttgaactctcttcgccaggttgtgctaatttttcaaacactttaatatttttctcaggtgataattctttaagtaatgttcctaatgttgcactcataataccgccaccaattaagatgacatctgttttgctatgttgtgttgtcataacaaatacagtccccctttttaaaatgaataatggaacgttcgagaaatacgacatattaataccactttaaatcaataagtgtctcaataggttcccatggtgatgctctattactatctactatgtatattaatattttataataacgaaactactttaattatatactttatgtgcgatagcacaaagacaaaaccacaaaccttaacagctatcaaccaatttaatttgattgctgattactcactattcattttaacataaagcgctaccattattataatgtcaaacttctttcattaatgatccataaaaaaaagatgagatgttagaaaacatctcaccttctgtatatttatattttgaaatacgtttttttataataatgacaagatgaaagtccaaatacagatgaatattagtaaacatacactgtatttcaatgtcatttttaataattctgattccttaccaacttgttttactgctgcagttgcaattgcaattgattgtggtgaaatcaattttgccgctacaccaccaactgtattagcagatacaagaagtgaaccacttgttccaatttgttgtgcaacagaagcttgaattggtgcaaataatgagttgttatttacaactgatcctgtcataaacacacctatccaacctaaaattggtgatagaactgggaagacattacctgctttagcaataccttgacccattgctgcacttaaaccaccataagttgtgattttagaaattgctaagatgaaacaaattgtaagaactggtaaccacaactctttaaatgtaacgccgaataatctacctgcatctttaaagttaacctttttagacattaaaattgtaataataatagttaataaaatagctgtacctgtttgtccaataatatttaaagtcaatactaatggtttatgcgtaacttcgctgattgttccaggtaagttgaatttaaatactaatgatgataaagcaccatttggtaagaataagtttttaaagaatggcgcactccaaatcattacaatgactgttaatacaatgaatgggctccatgcatgtaatactgcttttgcagaatgtgcttttgcaggttcaatttcttcatctttattaacacgataaatgtgttttggttggaattttttagaaaatactgctaatgctaacattgttaataacggtggaataatatctgctaattcaggtccactgaatacagttaataatccttgagtaaatgtataagtgattgaaactactaaaattgctggtaatgtttctttaacacctctaaaaccatcaataataaagataagtaagaatggaataatgaaatttatgattgccaatgttaaagttgctgattgagaaacacctaatactgaaacatctccaggtaatttcaacgtttctacaacacctacagggataccaatcgcaccaaaagcaccagacgctgcatttgcgactaaacataacatcgcagcttttaatggattaaatcctaattgtgttaataaaagtgcacaaattgcaattggtacaccaaatcctgctgcaccttctaaaaatgcgttgaatgcaaatccaataagtaaaacttgaatacgttggtcttgtgaaatatttgtaatactatcttgaattgttaaaaattgtccagattcaacagtaattttgtataacaatactgccatcataacgatatagccaatcggaatgataccttggaagaaaccttcgactactgcaccagaagcgataccaactggcaatttgaaaaatggtattgcaattagtaatgttacaacaagtgttgtaatagctgcataaatacctttcattttaaaaacagttaaacatagtaaaaacagtacaatcggtattgctgcaattaaagacgataataataaattatcaaatgggttaaacgtatttactaacataggctgactcttctttccataaagtagtagtgtaattgcttcattaaaatcatgctctggctatagcattttgttatcgataacattttacagaacagtgagattaatgtgatttttttcacaattaaaatataccattttttcagactattaacaatatcactttcctatttaattgttttatttttcattttaaatctgttcatcaaaatgaattgtacttaatgtaatgaagtaacttatactattcatgaattttacataagaccgtgctaaaataaggaagatactacgatgaggaatggaagttatagcaatgattaaacagataaatgtttctaatatgcaaaagtttgaatctcaattaatgaaagctcagtctgaaggttatacacatgtcgttccatatgccaatgagataatgatttatcaatcgatgttagatgcggttcaattatatcctaagtctatcgtggttgattatactgtggatggacaatacaaaaatgattgtcactatttcggtcaatcatcgatcaacattgccgattgggctcaaaacaataattattatcctaacctgatatatgcgattcaacagactcttgatttaatacattattactctgtagaaacgattttcgatttagctttattgacacttctgaaaggtgatttatcaatcgatggtcatgtcgtttttgattttaaagcccctatagcaacaagtgcttcaatatgggaaactattaaaactattgaagattttgatatgatgtctcagttttatttgaataaaatggcttatattgatcatcatcctataccttttcgcaacctttttatcgaggattcagaacaacttaattcgccagataattggttgtattctaccaagtttatgctacctaaatggttatataaaatagcaaagcaacgtgctgataacaaacaattacaaaacttcggcctgtatacgaagcaaccaaacgttttaaaagatcacatcgtttttatcggtgatcatcatcaatatataggtaattcaaaatatttatttacttacttcgttaaacataatccaatgactgcctgttattttgttactgacgatcgtcgcggaccacatttcatatcacctaagtctgaaaaagctgacgaattgattaacagcgcacgcgtagttatagttgaaaatgatatacctgaaacgttacaaccaaacggtactttaattcaattacatcaaggcacaccaataatgcaattatttttagatagtaaagagcctattaaaaatatagaaacacctttttatcgtgctaaaaggtataatcgctggttgcaattcgattatgttatacattctgctgatgatattagccacttttatcaaacggcttttcctagtcaccaagcaaatgtattggcttatggtaatcctaaacaccaatatttactacaaaagagtaacgaaagtactactcaacaacagtataagaaatcgtttaaaataaatgatcaaaaaccagttttattatacgcacctattggattagtgagtgcgcaacaattaccactatcagatgctttattcaaagcctatcatgttgtggttcagggtgttgatgaagcgatcttaccagaagaggcgcttgttgcaccaaagtatcttagtgctcaagacttaattctaatgtctgatgtcgttatcactgattactcaaatataatatttgatgcgatggctatagacaaaacagtagcattatacactccaaatcacagtcaatacattgagtctcaaggtgttaacgaagatatttggcgtcatctatcaaaaatttggtatacagaccgacaattattaattaataatttaatttcccaggcaataccagtgattaaatatccacaaatacaacataaagaacaaccattagaatctatttcacaacttatattgtctaagatgacatctaatcaatagtgtttaaatttctcagtggctgtgaatgaggtttaaaagtactataaaacgtaaactttgatactttaaaatacgcaaaaaacggtaaaccctaattcatattatagagtttaccgttttattttttaacttgcatcatagttatattaacattattgttggtagtttggatcagtaaccattgcttgtccagtataatcaaccgttacaattgaatattttccatttgcatttgggtctttaaaactaaacacatacttatagttgccattatgttcttcaatagaataatcattatacactttattattactaccaaatttatttgcttcattattagccgcatttaaagctgtttggaaatttggcaattgctgtaaagcttgatttttatttccattaaacggataaatttgacgtgcaaccggcgcggcattttgtccataatatggtgcaacgtaacttgatttttgattattattcgcttggttattacttgattggttattatttgtttggttttggtcattgtttgttgcatttgaattagattgttgctggttatcgtttgcactattatctttattatctttgtttacgtctttactatcatctttattatctttcttatctttagatgaatcatttgtttttttatcttgttgttcagttttcgctttatcatctttttctttattaccgtctttttgttggtcactatcttgaccacatgcagctaaaaataatgataatgctagtaaccctgtaactaatcttttcatacatatctcctcctataattcgatattcattgaataatcttgaaatacatatctaccatgtgtatcttttcatggcttgttaccaaagacgtcaacattaatatgatctgaattatcacaatatccataactacaatctaaggttctttttattataccctaatttttgttcattattatttaatttttgtgaattttatgttttctataaatttaattattttactttaacaattcattacgcatttagcatttcaaggtatacacaatatttattactatgatttcattttatctgctgcaaaaacaatcattataactctttttccataattaaatctgtatccgttacatcacctgtttgaaaatgatgttcaccaaccactttaaatccatgacgtttataaaatgcttgagcacgaggattatgctcccaaactcctagccaaattttatgtttattatgttcttgagcaattttttcggccaattctatcaattgtgaacctcttccgccaccttgaaagtctttcaaaaaatatatgcgctgcacttctaaataggtctcccccatttcttcagtttgagcactattaatattcatctttatataaccaacattcgcaccatcttcttgataaaaataatgaaatgaatctacatggttaatctcttgtgtaaatttctctacagtataattgtctttaaaaaattgatcaaaatctttgtcatcatagtaagaaccaaacgtgtcataaaatgttctagttgctaattcaactaattcactagcattttgttctgaaatttctttgattatcccagccatataaatcctccaataaacagtgatcgaatcaaaatattacttatgttatttttcagccaaaactatttaaaaatacattaacacaaatcaattacaaattgtattgattgtgtgtaacatcaataaatgatacatttattccagtaaaatggccgtattttcaaaagagaaaaagagaggatgtatcgttgtgatagaaacatttaaagcgtttgtaattgataaagatgagagtggtaaagtgacaccaactttcaaacaattatcgcctactgatttacctaaaggagatgtgctgattaaagtacattactctggtataaattataaagatgctttagcgactcaagatcataatgcagtcgtaaaatcgtatcctatgattccaggaatagatttagctggaacaattgttgaatccgaagcaccaggctttgaaaaaggagaacaagtaattgtaacgagttatgacctaggtgtcagccattatggcggttttagtgaatatgcgcgtgtaaaatcagaatggattatcaagcttcctgatactttaacattagaagaatcaatgatatatggcacagctggttatactgccggtttagcaattgaaagacttgaaaaagttggaatgaatattgaagatggtcctgtactcgttcgcggtgcttcaggtggtgtcggtactttagcagtactcatgcttaatgaacttggttataaagttatcgcaagtacaggtaaacaagatgttagcgatcaattacttgaacttggtgccaaagaagttatcgatcgacttcctgttgaagatgatcataaaaagccactcgcatcatcaacttggcaagcttgtgtagaccctgttggtggcgaaggtattaattatgttacaaagcgtttaaatcatagtgggtcaattgcagttattggtatgactgccggtaatacttatactaattctgtattccctcacattttaagaggtgtaaacattttaggaattgactcggtatttactgctatgaaattaagacagcgcgtttggcgtcgtctcgcaaaagatttaatgcctgaaaatttacatgagatcaagcaagttattacatttgatgaacttccagaacaacttaacaaagtaattaaacatgaaaataaagggcgcattgttatcgatttcggtgtagataaatagtattcatgaaaaagacatcccgttatgcgagatgtcttttttaatttagtatttgatatacataccgcctgaatctggttcggtaggtataaatccaaattttgtatataatttatccgctgggtagtctgcaatcagactaacgtatgtactctcaacagccacacctttaatatattgcataatatgctccataattagactgccgtaaccttgaccttggtaacttttcaaaactgcaatatcaacaatttgaaaaacagttccgccatcgccaatcactctacccataccaattaaccgatctttatcatacaaggttactgtaaataaggcattaggtaatcctttttcagctgcttcgcgcgtctttggactcatacctgcgttaatccttaatgcgcaataatcctcgcaagtcggaatatcatatgtcactttaaccattatttaccccacttttcatcacacaatatatcaacctagtataaatgtttatttacaatagtcttattcgcttctttaaacacttcatgatgacttgaaacataaccctctgcattcgcatctggttggatatatgttttagcaaggttcgctgcatttgcaccatcactaaatgcacttgcaattagatgtgattttgcatcatgataaacaatatctccacacgcatagataccaggtatactagttgtcgtattaccaaatcctttaacacgacaatcatcatgcatatctagctttgaagatgtttcactcaataatgtattacaacgatcaaacccatgactaataatgacatcgtcaaatttaactgtatgcctatcgccactttcaacatgttccaaaacaacttcacttatatgcgtttcatcatcattgccgaccaagtatttaatacgtgtttttgggcatagtttcacatttaaatctgtcaccaacgttttcatcgcttcatgaccacttacatcttcttttcgataaacaactgtcacgcttttagcaatcttggcaatatcatgcgcccaatctaatgctgtatttcctccacctgatattaatacatctttatctttgaaacgtctgtaactttgtacaacataatgtaaattagttaattgatatctctctacacctttaacatctaattgttttggattaataatacccgcaccaattgcaatgataactgctttcgatgtatatatttctcccgcttctgtttcaacttcgaaatgacgttctgcctttttcctaatatctaccacacgttcattcaaatgaacttccggtttaaaatataatccttgcttaattgtatcttttaaaatttcatgacaaggttttggcgcaatgccgccaatatcccaaataattttttcagggtaaattctcatcttaccccctaattcagattgaacatctatcaatcttacagacatatctcgcaatccagcataaaagcttgcatacaaaccagacggaccgccaccaatgattgtaacatctttcattatgtgcctcctatgactctctatattcatttctttcattaacgtgctcaaattgataattattatcatttaaagccattatactattaatatttatattgttaaaataaatcgcatagttagccatgaattatcaataactatcccatcacaatataaaaacacacctttcaaagtaagaaacaacaatgttcctttgaaagatgtgtatattttttagttctagttatattattttttaaaagactcatcacgtggttctttaagaattgcttgtcttaaaaggaaaaatagcaacaataaacctgcaagcatacctgtgtgcccaatacctgcaaagcctgcaaatgcttctggagagtatgatttaccagtgacttggaagaatccttttgtcaccatcatacctatagtaacgataacacctatgttatatacatagaagaaccagttaaataagtagtaacttgataatttaaataacttctccaatggtaataatattaaaaacataaacatacctaaaataagtgtatgtgtgtgtacaagtgataattgtgttgtaccagtaaaatcatatgcttttgttagctctctatagaaaaagccactaaataaacctatgatcatataaaaaagaaatgaatataataacctacgcattttgaatcctccctcaccttttcattatatccgattatacctattataacagtgacaaaaaagcgaagatatgacacaactgaatttggtttagcacatagtatgacagctaaaataactttacatcaagcgctatacaaataaaatagctataccatgacgctcgctacaaacgtcttgtatagctattatttctatttattaaattatgacggcacttcagtacgttttgtgctatgttttctaacaatagctgaaactaaacttgatacagcgccaaaaatcataaaccctataaacatccacattgtactatttaattcaatatgatgattcaagtataatagttctcttacacttgttgcatagtgtgtgaatggattccaatcatatacatatttttgataactttcaggcaacatttgtttaggtaacgttacaagttgcatactaaagaacattaaaatgaagaaaattggaactgacttcatacctagccataccataacacctaaaataaggcccacgaaaccaagaatcgcaaatgctacaaaaattgcgatacgatttggatggtcaaaatcaaatctttgaacgccttgcatgaaataaatataaacaaagctacctgcaaatgctgcaacaactgcaaatatcatctgtccaattgaagcaatgatacgatgttgcacgacgatattgttactagttctaaatgcaaagaacaataagatagacgttacgattgaacctatccaaattggcataaacattaggaatggtgcattaccacctgcttggtgatctttaactttattaagtttttcattatccacttttactggattcgtcaaaccattgatgtccgcggcattgactttaacattttgactcgttaatgtttccaaactttgcttcgtaatttgagcattaatattatcacccataccagttaacacagctgatgcaatttgtgaaccttgtaagcttgatccttcacttacaatcgttttaaatttagcctgcttaacctctacttgttgattccccattttttgtttcatttgttgaaccacttgtggcggaatttcacctgaagcaactttttgttgcatttcttcttttttactatccataactactttttgtgttttactcatagcatcttttgaaaagtctttatcaataatagctactccaaagattttttgatctttcaaatctttttcaaggtctttttcactatcaaccttaacccatttaattttattagaatcactatctaataatttatcctctaattttttaccaatgttaacatttttatcttgaatcgttgtacctttatcctcgtttaatataccaattggtaaatcttttggtttaggattatatgcaggataaaaagctaaagaaaagattaccaagataatcatagttgctattggtgcaatccataataatttatttttaaatatattcattttattaattacctccttattagacaatgtgttgaatatttcgcgtgttgtctattataatatgtaagtgggaataaacaatacacaatgttcatcaatacgttcattaatagacaaatacacccacattgttcaataacacaaggaggttgatttatttttgaaagaagataggcgaattagaaagacaaagtcctccattaaacaagcgttcactaaattactacaagaaaaagatttagaaaagattaccattcgcgacataacaacacgcgctgatatcaatagagggacattttacttacattacgaggataaatatatgttactcgcagatatggaagatgagtatatttcagaactaacgacatatactcaatttgatttgttacgcggttcttcaattgaagacattgcgaatacttttgtaaataatatactcaaaaatattttccaacatattcatgataatttagagttttatcatactattttacaattggaacgcacgagtcaattagaattgaaaatcaacgaacatattaaaaataatatgcaacgttacattagtatcaatcattctatcggaggcgttccagagatgtatttttacagttacgtttccggagcaacaatttcaattattaaatactgggtaatggacaaacagcccatttcagttgatgaattagctaaacatgtgcataatattatttttaatggtccattaagaataatggcagaaaaccgtttgcataaatcaaaccttgattcactaacttaagtaatactcgcttttcctaaatcctttagaaaggaactatatatcatgattacttcattcagacattctgaagatatagataaacatattataaaaacaccattagatcatacagcgtcatggattaatgtagtagaaccagaccgagaagaaattgaaaatcttatggaacaatataatatacctgaagactttatacgtgaccctttggactcagaagaaagttcccgtattgaatatgacgaagatactggttactcattaatcattattgatttacctatcgtcaattcaactaatcgtagcgttctatcttttgtaacgattccattaggcattattattggcaacggtattatcgtaacagtttgtgacgctgaaaatgaatttttagaaaatttacctaagcgtgatattaatttaaaatttcacagcagatttgcattagaaattttaactactattgccgaccattataatcgtaacttacgattacttaataaaagtagaattcgtattgagaaagaactaaaaaataacattactaacaaacaacttttcaaattaatggaagttgaaaaaagtttagtatactttttagctgccttaaaaggtaacgatacaattattaaaaagttattccgtttacctgcaattaaacgttttgaagaagatgaagaattactagaagatttaatcattgaaaataaccaagccatcgaaacaacagaattacatcaacgtatcttagaaagtatcacaacatcatacgcttccttattatctaatgatatgaatacgattatgaagacattaacacttttcacggtactattaacgttaccaacactcgtatttagtttcttcggtatgaatgtgccgttgccaattgatgaccatagttatatatcttggattattgtggtaggtatttcattaattcttgtcgtaattgttagtattttcttatggcgtaaacagaaattataactaaattaaaaggtatgacagcttaaagtttcatcctattgcatttgcaatgactgatactttgattactgtcatacctctttttttattctacaacttctttatttgcttttcttttagataaaattaaagtaactgttatagcaatgatgaatgatattgtcataccaacaaagtagtgtaaccatcctgcatgtactggattgattgaaataaatcctggcaatccagcagttcctaatgcgattgctttaaccttgaagaaagcaatatatgctgaaccaatacctgatccaacgatagcgccaataaatggatatcttagttttaagttaacaccaaacatagccggttctgtaataccaagtaatgctgaaatacctgcggcagatgccacaccttttaacttcttattttgtttaataataaagaacgctgcaattgctgcaccaccttgtgcaacattagacattgtcgcaatcgggaatataaatgatccacccgttttagtggcatctgcaattaatgtcgtttctacagctataaagctatgatgcatacctgtaataacaatcggagcatacaataatccgaatattaatccaccaattgcaccaccaaattcataaagccatgttaaaccatctgataaccagtaacctaattgtcgagtgattggacctacaaatgaaaatgttagaaatgctgttataaaaatagataacaatggtgttaacaaattatctaacaccgttggaataactttgcgtaaccctttttcaattgaggctaagatataagctgctacaagcataggtaacacttgtccttgataacctacttgattaatatgcaaaccaaaaacatcccaatatggaatagccttacctgcttcaactgcttttgggaaatcgtatgcgctcattagcgatggatgaactagtatcatacctaatgcagcacctaaaaatggattgccaccaaagcgttttgctgcactaaatccaattaaaattggtaataatgtaaatggtgcattcgcaaaaacatttatcatttcagctaatccagcaaattgactatatacatctatcaatgatttacctgaaaagaataaatctttcgcagtcaaaatgttatttaaccccattaataaaccaccagcaacgatggctggtataatcggaacaaagatatctgaaagcatttttacaaatcgctgtaacggattcatatttttagcagattgtgctttgacttccgaagtggttgatgcttcttttccagttaatttttccagttcactaaatactttattgactgtaccagacccaataataatttggtattgtcccccagtagaaaacgtccctttaactacatccatattgtttagcgcctcttcatttactaaactttcatcatttaaaactaatcgtagtctcgttgcacaatgcgccattgcatctaaattctcttctccgcctatcgcgttcaaaatttcttctgcggattgcttataattcatatatttagcctcctaattagaaccggttccatttattccactttattgtaaccggttccaaaaatatttgcaacactctattatcattttatataaacacctacaccatttttgatagcgcattcatttttattgctatactacatgcatgtatattaacattaattatcggaggtaattttatgaaagaacgtggctatatcgaacagctttggcgtgaggaaaaatatcatgtattgttacacagtcaacagtcttaccaaatgataaggaatgctttaaaaacggatttatcacttcatcaagttcaacaaatgattgatgttgctttgttaattgaaccgagtataggaagtgtatgtaatgcttttgatcatatgtggggatatttaaaaaaatgtgcgaatgaagaagaaagacaacaatcaaaactacttaaagctgattttattaatggtaaaatcgacacccaaactttattagattttttagcagaacttgctaataaatatgatgttcaatatttactacaaagtcgtgttttaaacacaaaaagaaagagatagattgaaactttagttgtaacggacaaatagtagtcattggagttcagcaattcatactttgtactaaagtttactataatctatctctcaaggtttaaatgtacatatctatattaaaatgcgtttcatgatgttagaagataccatacacatttaattagttacagcataaatcaatttatacccttaattattacattgtttatattttaaattcgggggagtaattttaagtaatatcttgttgctgctaattctattgttaataaattgatattagatgtagaaattgagtgtgaaagttaataatagatgatttagctagtaacataattaattcatatatagtcaaaaagttctgttagatactgttcttgatgaatattctttgatgttaggtgttagctattctagatgagtttcttagatgtggatgcctgtcttgatgaagttatctatgatgttaatataatacttgatgttgattcttagatgttagtgcgatttcaagatgctgattctttgttgttgcactatcttggtgacgtttctagttgtttatagttatcgcatctcttgatgtaaaatctaagatgtttatgcatttctagatgttaattcttcgctgcttaagaattatcttgatggtaaatctagttgtgccatgcattttctcatgatgaatctaaggtgttaattcattgatgtgtgctgtttcttgttgcttcattatcttgatggtgaatttcgttgtctaatgcactttttcaaatgattattctaattgttacagcaataactagatggattttcttagatgttcacttttctagatgtttatacttatcttgatgttttctaaacagaacttttaaacgctttattttttagtagattgtttaaaatttcttagttgatggttattgttgttgatttgaataatttgtagcgaatattttgtaacagggctactaagaatttttataacaagaagtgatttcaatcgtactaattttcagcgtttgatgacaaaagtgtatgtccaaacttaaataatggcgataaaatttaagtcatgggtacatttaatgttttttgattcaaacttccattttggtcaatttgctttttttataacatagttgaatatcaataaaagattagcaagttagttcaaaatggctatgtattgttttttgaaatacataggtttgaaatctatattaattatgcaccaaataatttaattagactctatcgaaaatttccaaattttgcttactatctttctaattttacttttatattgttcgcaatgcataaaaacaagcgttttcctaggagttttcattaatttcttttatttttcactattaccttttcaaaaatattcaactataataggtatactatccatgattttaaaaatttccatgttttacatttaaatgatagatttcaatatatattaggcaggagagagaaatatgacatgccaacttaaaatacatcatacattatcgacaataccaagtcgtaatattaataatattatggtgctattttcacttacaagtaaactcaatattacgattaatggtgaaaccaaagacgtaagtaattatattatcttaattaaccatggtgatatttataatattaaccacggcgaaaatataatcgaattaatgatacccgttttttatttttatcaacaagatgatgatttctttaatggttatttagatcgtcatttattacaatcaagtaattatattaagtcattaattgccgatttaatcagtacaccaacaagttcttctttaatggggaaaaatataggtcaaagtattatagacactttacttaaagaagcttttataagaatagatcatgaatatttaccaaatattgctttaagcaatccggtgttcatagactgtgtaaactatattcatgacaatattgatgcgcacttgtctttaaaagatatagcgatgcattgcaacatctctgaatcatattgttctaatctttttgttcgatatttgagtatgaattttaaagattattttacaagtattaaacttgttaacgccatcaatttattactttctacaaaacattctattacaactgtttctgaattggccggttttaacagtcatacaaattttgcaaatcaatttaagaattacttgcattttagtcctaaacagttccgttcactcgtttccaagattactgaaccaccacaaatacacttccaacaagataacgtatcacaattcactgagttaatttcaacaattgatttaacagctcaactggctacaaatacaacagatattcatatagatgattttaatccgaaagatcgaagtcagcgtgccaaagtatttgttcgatttagtaatttcaatgaactatttcaatttattttcaatgaatattacgatattaactttgagcacttaccaaaacctgtcgttttcattgacgatattcacgatattgagattagccaaacgaattacaacctgttaaatagatgttttgaaaagcttttcgaaaaaaatataggtttagcaatcgctattaaatcaacacaacaattcgaaacgatgaagcaattaatactaacatttttacaaggcaatcaagactataagacaagcaagaaattagttaaatttatgctcgtattttgctctaattctatgacagcagaagaaattcatttatgtcatcttaaaattaaaaacaaaaataaagaaattaaatatagtgtgacagtcgatggctttttagaaacttattcaaccgtggaacaagtttatgatgtcatgcagcgtcttaaattccattattactttattgatattgaaaattcaaaaactgcaacacatcttatcactaaaaaccaacactatcatcaaactgacactcattttgaacagtataagaaatttattttagattcaggtatatcatcaacacaatttgtatataataacctgtctgtaagcggatttaaatatactaatgatggtaagaatccaattcaattatctgacatagtgtatcacttaatcgcattattacgatatggcggtggcattagctatcaattattagatgaccattcaaattatatttccttgtacaacaaatatggtagccccctaccattaatgcatttatataaaatgtttagaccttttgttaatgaagatattgaaattacaaataattatgtattgagtcgtaaagataataactaccatttcttattattcaataaaattaatgatcgatatatgtcagacgtaaaacaagatttcattttccataatgaattacctcaagactctttgatgattattaaaacattgaatcatgaacatggttcaattcaacatttgcttccaataagcgatcaacttgtttatatagaaaaagaaattttagatgaattagacaaaacgaattaccctaaaacggagcttgcagttcaagaagaaactggtcgtacatttgaactcaagttaaatcacgacgaggttaaatatatttgctttaaaccaagctaaatactaacagtcctcttgtgtttagtttcttacgttaaaggctatttatatcataaggagatgatttgtaatgagtaactcacaagcaattcaagcaattgaaaacgtgttagcaacgtcaaaagttggtgtattatcaactgcatataataataaacctaatagtagatatatggtcttttataatgatggtcttactttatatactaaaacgaatatccattctgctaaggtcaaagaaattaaagataatccagcagcatatgttttgttaggctataacgacacaactaatcgtagtttcgttgagatggaagcgacaatcgaaatcgttacagaacaagaagtgattgattggctatgggaaacacaagacaaaagctttttcagttcaaaagaagatccagagttatgtgttttaagagtagttccgcaatccattaagctaatgaatgataaatcattagatacacctatcaaaatcgatttataacacaaagtgtatataggaaataacttttatgaattctagatataacaatgttaaatacttaaaataactcgctataattaaagtgtttaatatgtttacaattcaatttgcaatgtattgttttttagacacactttattcacatttaacgtgattagggtgtgtctttttaaattaattttatgtaatataaatactgcatttgcaaactgttgcacttttaggtataacagaattaactacatttaaggagattgatgaaccatgaaaaagaaaaaaggttttggtcttggtattagtttaatcgccatcatgttaattgtatgtattgtattagtaatcatgatgatgactggcggaaagaaagatacatactatggaattatgaaagataatactactattgaaaaaatgattagtgaaaaagatgaaagtattgaaaaaaatgttaaattaccttcagattcagatgttaaagttaaaaaaggtgattttgtaattgtttataaattagcagattcagataaaattgttaaagttaaaaaagttgaccatgacgatgtaccacatggtttaatgatgaaaattcatgacatgggcaaaatgcacatgaaacactaattgtaatttaaattacaaattttagttgccatcaaggtatatacgagtaaaagcagcggtaagttgatttccaatttggaatcattttactgctgctttttatatttgaaatactttcatattgaatagctccacttgccgttcgcctgcgctttgcgcatgcataaaagcccctaacaacctgaggtcactgcgctccggttcgcctgcgctttagcgcatgcataaaagcccctaacaacctgaggtcactacgcttcggttcgcctgcgctttagcgcatgcataaaagtccctaacaacctgaggtcactacgcttccgttcgcctgcgctttagcgcatgcataaaagcccctaacaaccaaaggttgtaaggggctttaaatgtcagatagtattttttaaattgattttaaatattcttgaccttttgctttgtcatatacgttttcccatttagctataacgattgttgataatgcattaccaataacgtttacacatgtacgtaccatatctaagatacggtcaacaccaataattaatgctaaaccttgtgccggtaagcccatggcacctaatgttgttaataaaacaacgattgaagttcctggtactgccgccatacctttagacgtaatcattaatgttaacatcaacacaatttgctctgataatgttaagtgcattccatacatctgtgcaacgaataatgctgcaatagattgataaagtgctgatccatctaagttaaacgtataaccaattggtataacaaaagaagtaatttcttttggagaaccgaagttttccattttcttcatcattacaggaagtacagcttccgaacttgatgtagaaaatgctaaaagcaattcacttttcaagattctaataatattcatgatattaataccacacatccatgcaactagtcctagtatagcgaatacaaagaacaccattgcaaagacaacaactaatactaattttaatagtggtaataatgcggatgcaccaaatgtaataattgtagtacaaatgaatgcaaacactccaagtggtgctaattttaaaattttattaatcatccagaacacagcttcaagcgatccgcttaaaaattctttaactggttctgcttttttacctacagcagctaatcctaatccaaagaatactgcgaagaagataataggtaataattcacccttatttaaagcttcaaaaaagtttgtcggaataatatgtacaatggtatcaataaaatgatttccatatgtagattgttctgctgcatgtgcagttgattgatatttagaaatatcacctttaggtaattttgttgggtctaatccagcacctggtttaaataggttaccgaagataatccctaaacctattgcgattgttgtaataatttcaaagtataaaattgttttccagccataacgccctacagttttcgattccccaacgttcgaaatagaaagcgctagtgagcaaaatacaactggtataacgatcattttaattaaatttaaaaatacgtcaccaaatggtttaatgtaatttgctacgttttcttgtccatataataaaagtcctacgacaacacctaacactaatgcaataacaacttgcataggtaggctaatttttctcttgaatagagccatagtacaaactccccttcatctgacatcactcaattatatcagaaaattgataattatctataaaaaattaaaatatttatcttttatagatgtcaaaaatcactaatttccatacaaaaactgtttacctcaaataattaaaattgaaggcactaaactgcttcaccagtttaacgtttcactattttgatggtttataattttgattgaaatatttatgctttgcagttttcaaacttttcttagtctctgtatcaaagccttcaacaaataatcctttattagtactgattggttgcacaacataagttacaccaggttcatctttaaatgtaacttccttatagaagagaccttttttagcactatactctgttttttctgatttaattttatcttttagatttttctcttccaagtaactgtcaattagttgaatattcttatggccttgatatgttttcagaccaaagaaaaatgctactgcaacaattaatgaaataaataatataatgataactttaatcgcgttttttttcttcttcattatgtaactcctttttgcttatctattcagtatgaacgaatcaatttatttaataaagagtttttaccagattgtaacaaatttttttattctcaatattattatagaaatcgaattacatacacgatgcttttaaaaaatttaataacaaattttattttactatctatcaaaataattgactacttttaacaattaaggatgatacaattacatttttttcaatttaaaaaatcagtcatatcagtaattaccgatgaaaatactaagatatcgatatattttgcattatttaacatttaaattcaattatagacaattcaataattgcgatgaaatcagtacttgacaactattacacttcataatattgtttattttaacaaggagtgattggatgtatgtagaaaacagctatcttagcaaacagttgtgttttttattttatgtttcttcaaaagaaataattaaaaaatacacaaactatcttaaggaatatgatttaacctatactggttacattgttttaatggcgattgaaaatgatgaaaaacttaacatcaaaaaattaggtgaacgtgtgttcttagattctggaacactgacaccattactaaagaaattagaaaagaaagattacgttgttcgaacacgtgaagagaaagatgaaagaaacctacaaatttctctaacagaacaaggtaaagcaataaaaagccctcttgctgaaatttctgttaaggtctttaatgaattcaacatttcagaacgagaagcatcagatataattaataatttgcggaattttgtttctaaaaattttgactattccgacaaaaaataactccctatcataaggtgatgggcagaagtatgcatcgatatgtttattcattatctttattgcttgtataaatctcgatgctcagttcttttgccctgattccttatcaggcacaaatctacccatttattacttttttatctccccttttactttaacttttttaatactactcatataatggctttgtaatacaaatttctataatggaagtgatgatattgaacttcaatcaattcgagaatcaaaacttttttaacgctaatccaagtgatacatttaaagatttaggtaaacaagtatttaattacttttcaacaccttcatttgtaacgaatatatatgaaacagacgaattatattacttagaagctgaactagcaggtgtaaataaagaagatattagtatcgatttcaataataatacgctcactattcaagctactagaagcgcaaaatacaaatctgaacaactcattttagatgagcgtaacttcgaatcattaatgcgtcaatttgattttgaagctgttgataagcaacatattactgctagttttgaaaatgggttattaaccattaccttgcctaaaatcaaaccaagcaatgaaactacttcatcaacatctattccaatttcatagttaaatttaaaatgaatacactactaaagccttaatgtcatgctacgaatattgcgcatgatattaaggctttgtatttaactaaatgaatggcatgtattacatatcaaccgtttttcaatgagccatattctttttggtataaatgacgcatggtaaataatgcaatacatccaaataccgctaagaaaataaatgctaaatgacttgatcctgttaaattagctacgtacgtgattactagtggtgggaagaatcctcctaaaccacccatcattgatacgataccatttgcggatcccgcttcatttaagaagtatgatggtactaatttgaagattaagccgttaccaatacctgcacaaatacttattgttaaacagcctacagtgaataatgcgatatggtctgaaatacctaaaataatggcaccgataatcataacaacaaaatcaatcatcaatactttaactgcattaaatttatcacctaaaatgccacctattggtcttaagaatgttgccagcgcaatgaatacacctgatcgaataccagcatctactttgtcaattccaaaatgatttactaagtagttaggtaagaaaataccaaatgctacaaaagcaccaaaagtaataaaataccaataacttaagtaatataatttgtagtttttagataatgttttcatttgagccattaatggtactttaattttacgttcttgtgtgtcaccaaaaatgaacataattaatgcaaataaagcgataataattaagtaacttctaactgttgtttgccaaccaataatacccgctatcggtggtgctaaaaatgaagaaactgctgtaccgatatttcccataccataaataccatttgctagacctactttttctttagggaaatatttaggaactgatgtaacaccaactgagaaaattgcaccacctacaccaaggaaaaatcctgaagccattaacatacccggtgtttgtgcttggcttaagaaaaatatcgggaataacaatacgataaaactagtaaagaatacccatttagcgccaacaatgtttgttaaataaccaaatggcacacggagcaccgatcccaaaataactggtatcgctaaaatgattgatatttgaccttcagtaacattgacatcttgtttaataaagggcattaatggcgcaattatactccaagccataaacccaaccactaaacttaatgtttgtaatgtaagttgaaagccaccttttgttttgtacatacgtttcaccttcatcaaaatcatttattttttaatagatatcaatactctgcctatatattagaggtcaatgttatttaaaaatgctttcatttatatgaaaacattcaatatagacaaagtattgactacatatatattttattatgattgtgaaaaagtgaacataaggattttcccttatttatgaagtgatttaccctatacaatgtccctttaagatgcttttagacacttattcgccatcattttaatcatattatttaggaacactcacatacttttcttaatttttttcaattagttacaattactgcttgaaaatcacgttacgttatcctttatgctgacaacataaggaggtttatcatgtataaaatcaatattattagatcagattccgtctataataatatactcaaggcaccaataaacgaccgtgattcaattttcactaaagaaatattagtaccttttaaaaagaaatttgaggtacaacatatgcctatttataatgatgacaaacagacaatgagtgcgattcaatttttagatgcctttcaaatttctcccaaagatttacgcatgtctgaccaaatgtcaatacaatacctgaataatgatttctggagtaattgcgaaaaatatttaaaagttgctatagatcaattttcaaattatagtatctcatctcaagtttctaactatcatttcacagtattacttggagatcgccaaaaaccacttatgtatctaaataaaaatcgcggtggtgatggtggcataccaggttatattatgatttatttagtgccgagtacaagtacaattaattctatgaaaagcttaattgcacatgaagtaaatcataatatgcgctatcaatatattgattgggatggcggaagtttgattgaattgattattgcagaaggattagctgaaaactatgtagaatcattgtatggtaaagcgcatattggaccgtgggtaacaaatactaattgaagtcgtgataacgtaaaaattaaaaatactatttataatcatttacatttaaagcatatatttgaatcgatgccttatctctatggtgatgatattaataaacttcaaggtaggcctatcgttggcttatctcatgctgccgggtatgcatgtggctatcacttggtaaaatactttttacaaaaaacaaacatacctattgaagttgctacaacacttccagcacaaaaaataataaatgaggtgactgaattttggcatacacatacactttaaaagatattattgaaattacaggtgtaactaaaagaactttacattattacgatgaaataggattattagttccagataaaaatgataaaaattatcgcgtttataaacagcaagacttagaaaaattacaaaagattttaatactcaagtcttttgattttgatatcgctaaaataaaacaatacatttcgtatgataatgaacaattgcgaaagttattatcagagcaaataagcaagttagataaaaagatttctgacttacaattaattagacgctctgtatgtgaatttattaaaggactctctctaatagataccagcattttaaacaagacactacagtcacaatatgataaagaagcatctataaaatatggtcatacgaaagcatatcaatcatttattagacgtaaagacagcttacaatcgcaggatatcagacataaattgacaactatcttcaataaatttaatcatatgtctttgagtcattatccaatccaagattgtagtgatctcgtatttgagtggaaggcatttatgaacactatcgctgattttgatgatgaaacattatgctgtattgctaaaacatatgaagatgatacgcgtttcaaagattactttaattcatatgataatcaaaatttagcatcatacatttcagaagctgttaattattttttgagcaatgtgaataagagcgacaatttttaatcctcatacagatgctacaacactgaatacaccaactaaaataattgttcaaagtagaaaactaatcatttattctctaaatcaataactatattaaaagttatacctttgcaaagcgaattagtataggttaccgaaaggagaaaggattaggttccattcgatttataaaaaaatatatttcgaaacatacaaaagcgccagaagataatcatttcctctcgcgcttttatactgaattatattaatttcaaactctaaaactctaataatttctttttcaatgcatattcaactagctcaggtttactctttaagccaagctttgtcataatatgcgtcttatgtgcttctactgttttcacagatacaaataatttctctgcaatttctttattcccgtaacctttggcaataagtggcaatatttctagttctcgttttgataagattttaaaaggatctgttgtgtttgcagtgtcctgatttgaattagatacaaattcattcactaaagatgttgtaagtttcatatctacatatgtttcacctttatatacagttcgaatagctaacaataattgttcatcaggtgcatttttcaatatgtaacctttcgcaccattacgcaacacatggaacaaatactcctcatcatcaaacattgttaatattagtattttagtttcaggaaaactgtcagcaattttactcgtagcgataagacctgactcacctggtggcatacttaaatccattagtaacacatcaggtttatattccattactttttggtaagcttcgacgccatctgcagccgttgcaacaacttccatatcattttgataatttaaaatcatagagaaccccgtacggacaacagcgtgatcatcggcaatgactattttcaattttattcccccaatgtatgtttcaaattggaatgttcaatgtaacattggtaccctcaccaattttcgtttcaatattgacgctaccgctgactaactcagctcgctcattcattccatataaaccgagtccagaacctttaggcttagaacttggatcaaaaccatttcccgcatctatcacttctgctaccaaatggcgcccagtttgacggatacctacatttatttcatttacatcagcgtatttcaacgcatttaaaatagcttcttgcactactcgataaacaaccgtttcaatatcactatcaaagcgagtatttttaatatttgatgtatatatgatttttattccataattttcttcaaactgtttaaaatatgatttaaaagctgcttcaaggcctagatcatccaaagaagcgggtcttaattcaaccgacatattacgtatatcatcaattaatttagcgacaatatattcaatattttctgcgtcttccaaaagcttagttgtatcttcttgatattttaataatctcaattgaacatctacattgagcatttcttgaatcacactatcatgtaactctctagaaattcgctttctttcattttcttgggctgagattgttttacgcatcatacgttgttgatgcaatttctcttgctgttcaatttgtgatgaaacattttgaagcgtaaatgcatgaattcccctgtcttgatcaatcaactgatatgttgctgtaaatggcatcactttttgatctttcgtcttcataaatacttggaaattcgtagcttgtacttgcatcgattctaagaaacagtctttacatgattgtacatcataggcatttgtatacccttcacatctgtgacaaatcgcattcgccacagcactgtaattatcttcttcagataatatatctttagcagcatcattcattgcaataattttaccgttatcatcagcaaaaactatcttttcgattgaatgctcataatattttttcaataaagtatctaactgtatactgtcctcattaatcatgacttacaccctaattcatctcattatttatcatcattgaaaataccaaacttacgttgaatatcatcattatcaaatatttttggtaaaggacgaccatctctttgaccaaataatagtacgccatacacttgattcttataccaaagcggcactgctaaaactgctgttaatgattcgctcaataaaattggatagtcaatcttttcttcaggccctaaagctaaaccaacattggctattaccatacgctttcctgttttcataacagttccagctaatccacgaccttttcttaaaataatcaatttaaatcgattatttttattacctgaaacatagtgccattttattggagatgatggtttgttagattcatagaaagcgattgccgcaaaatcataaccctcttctttgcgtattttatctaatgtctcttgaaatctacgatcttcaattattgcttctggtgtcaaatcctttcacctcttatgcttacactttattcttacggtaaataatatatctgcgatttatatatgtcaaaggtacactccaaacatgcaccaaacgtgtaaatggccaacaagccataatagtgaaacctaacaatatatgcattttaaatgcaatcggcacaccactcatcaatgacgcatctggttttaacataaataattgtctaaaccaaattgataatgaagttctgtagttaaagtctggatgttgtatatttgttactaatgttgcgtaacatcccataaatacgataagtaataataagaaatttacaaatatatccgacgctgaacttaatcttcgaatacttttcgtagtaacacgtctcgctgttaataaaaacatccctatcaaagttattataccaaagatgctaccaatataaacagcgcctatatgatataaatgctcagacacacccactgcatccatccatggtttcggtattaacaatccaactacgtgtccaaaaaacactggaataatacctaagtgaaataataaacttccccacatcaacctttttctttctattaattcactagatttagctgtccaagaaaatttatcataacgataacgtgcaatatgacctgcgacaaagacaactaaacataaatacggaaatataacccataaaaactgattaagcatgatgtttcactccttttggtgatgtcaaacataatttcaatgtttttctaagtgcttgaatcacataggcatatggattgttatcttcaccaagtgcattcgccatcacatatgttccatcctcaataatcataatgattaattgaatattctcttcagctcttggatcatttcgccattctgccacttgcaaaaattgaagcatcaacggtagataatcagaaagttcattatctaccatttctagtccaaacatttcatataatacctttaatttagctaacatttgcccacgttctttttgcgtatcaaatttgttatacgtcatatataatggtgcttttttcgtaaaatcaaatgtatctgtataaatcgctttgatttctgataatgaaaatgtcatcattacatttctaaatgctactaaatcttcatatgctggatgatctttcgaaattgtttcttcaaaagtttttggatgaaaagttaatttttctggaaaacataactgttgtgccatatatccaaaactttcttgatattttttaaaattatcgaaattaatcacggaaaatccctccatagaaattctcattataaatttcttgaccagttttccctgaacctactgcaacgccacagccttcacagttatctccaaaatgctcgccgccgtaattgtatcctgtactaccttgtgcgtgatacgtatctaaataggtttctttgtgtgatgttggaataacaaatcgatcttcatatttggctagtcctaataaacgatacatgtctttagtttggcgctcggttatacctaatcgctctaatcgagacgtgtcaaatggctgttgagtaacttgagatctcatataacttctcatcattgccatacgttgtagggctccttttactggctctgtatctcctgcagtgaaaatattagctaagtattcaataggtaaacgcatttcttcaatggctgggaaaatcgcatctggattttgagttgtatttttaccttcaaaatagctcataattgggctaagtggtgggcaataccaaaccatcggcatcgttctaaattcaggatgtaacggaaatgcaagtttatattcaattgctaacttataaattggagagttttgtgcagcttcaatccaatcgtaaccaataccatctttttcagcttgagcaatgacttcttcgtcaaatgggtttaagaatatatctaattgtttttcatataaatctttctcgtctactgctgaagctgcttcatgaactcgatctgcatcatataataaaacacctaagtaacgcatacgtcctgtacaagtttcagagcataccgtaggcatacccgcctcgattctcgggaaacagaaagtacacttttcagctttgttcgttttccaattgaagtaaactttcttatatggacaacctgtcatacagtaacgccatccacgacatgcgtcttggtcaactaatacaatgccatcttcatcacgtttatacatagcacctgaaggacacgatgcaacgcaacttggattcaagcaatgttcacataaacgtggtaaatacatcataaaagtttcgtcaaattggaatttaatatcttcttctattttttggatgttaggatcttttggacctgtaacatgaccacctgctaagtcatcttcccagttaggtccccattcaatttcaatgttatcccccgtaatttctgaatacgctctagcaactggcgaatgcttccctgatttcgcagttgttaaatgttcataattatagttccatggctcataataatctttaattaatggcatatctgggttataaaaaattttacctaaagcaatttttgaaattctacttccagattttaattcaagtttccctttacgatttagtacccaaccacctttgtagtgttcttggtcttcccaacgtttcggataccctacacctggcttcgtttctacgttgttgaaccacatgtactcagcacctggacgatttgtccaagtgtttttacatgtcacactacacgtatggcatcctatgcatttatctaaatttaataccatcgcaacttgcgctttaatcttcaagccaattaacctccttcatctttctaactgctacatataaatccctttggttcccaattggtccataataattaaagtgataactaatttgtgcgtatcctccgactagttgtgttggtttcaaatggattctagtcggcgcgttgtgtgaaccaccacgtgtatctgtaatttctgacccaggcgtttgaatatgtttatcttgtgcatgatacataaacattgtacctttaggcatacgatgcgaaataactgctcttgccgttacaacaccattacggttatacacttctagccaatcattatcttggatatcgtgtttttcagcatcttcatttgatatccaaaccgttggaccacctctaaatagtgtcaacatatgcttattatcttgatacattgagtgtatattccattttccatgaggcgttaaataacgcagtaccaaagcatctgtaccacctttaattttcttatctctattcccaaataccattggcggcaatgtcggtttatatactggtaagctctccccaaattgttggaaaacttcgtgatccacataataactttgacgtcctgttaatgttctaaaaggtactagacgttctatattcgttgtaaatggtgaatatcgtcgaccttgtttatttgaacctgggaatactgctgtcggtattacttctcgtggttgtgaagttatatttaaaaacgaaattttctcagcagcgcgttcgctagaaatatcttttaacggcattccagtttgttcttcgagatcttcatatgatttttgtgataatttaccattcgtagcagatgaaatacttagtattgcatcagctacattacgtgctgtatcaatacgtggacgattcgctctcacagaatcatcatttgtatcactccacgtacctaacatactttttaattcttcatattgttcactgacaccgaaacttacaccatgtgctccaactttccctttttcaagtacaggaccaagcgtgacatatttgtcgtaaattttagtgtagtcgcgttctacaattgcaaagttaggcattgtacgtccaggtaccgcttcaatttcacccttcgaccaatctttcactacgccgtatggtgttgaaatttcttgctttgtatcatgactaagtggagttgtcacaacatctttaaacgttccaggtaaatagtcttttgccatttctgaaaatgcttttgccaacgttttataaatatcccagtctgaacgcgattcccataacggatcaatggcaggattgaaaggatgtacatatggatgcatatccgttgatgataaatcatgtttttcataccaagtcgctgccggcaaaacaatgtcagaatataacggtgttgccgtcattctgaagtctaaagagaccactaaatctaacttacctgttgtttcttcacgccacgtaatttcttctggcttttcatcttcatttggtgtagctaataaccctgattttgtgccaagtaaatgcttcataaagtattcttgaccttttgcagaacttgaaattaagtttgaacgccatataaataatgattttggatgattctttttcaaatcaggatcttctattgcaaattgtgtttgttttgatttcacttcatcaattgcacgttgcaaaatcgcttcatttgaatctataccttcatctttagcttcttctgcaaacaacaaactatttttattaaattgtggatatgatggtaaccaaccaagtctagctgctaaaacattataatcagctggatgttgatgctttaactcctctgttttagctaatggagattttaaacgatctacatttgactcttcatatttccattggtctgttgcaaaatagaaccaacttgttccgttttgcaaacgtggtggtccttgccagtctttcgcaaatgcgacagtactccatccttcaatcggacgacatttttcttgtcccacatagtgagcccaaccgccaccgttcacaccttgacagccacataacataactaagtttaagattgaacgataaatcgtatctgagttaaaccaatggttaatacccgcacccatgataatcattgaacgcccttcagtatcgatagcgttttgcgcaaattctttcgctacttgaatgacaacactttgttttacgcctgaaatggcttcttgccaagcaggtgtatattttgattctgcatcgtcgtatccttttgattctaatttatgatcaaaacgacgcacgccatattgacttgccattaagtcaaaaattgtagcaatacggactttgtcaccatttgctaaagtgacttgtcgagttggaattggacgattgaatatcccatctccatcactatcaaagtatgggaattgaattgtttctaattcgtatccaccttctgtcattgataatgtagggttaattttagaaccatcttctgtttctagttttaagttccacttcttaccttcttcccaacgttgacccattgtgccattaggtactactaaactatcgctgattgcatcatgaataactggcttccattcgccttgctctgttgtttgacctaagtcactcgctcttaaaaatcgacccgctttatatccattttcatcttcatccagcatgataagaaacggcatatctgtatattgtttagcgtaatttataaagcgttcattaggttgattaacataatgttcttgtaaaataacatgcgtcattgcttgtgcaattgcagcatctgaaccaggattcggtgctagccagttatctgcaaatttcacattttctgcgtaatctggtgctactgaaatgacttttgtacctttatagcggacttcagtcataaaatgtgcatccggagtacgtgttaaaggtacattagagccccacataataatgtatgatgcgttataccagtcacttgattcaggcacatctgtttgctctccccaaatttgtggagaggcaggtggtaaatctgcataccagtcataaaaactaagcatttcaccaccaagcaaattgatgaatcgagcacctgctgcataactaatcattgacatcgctggaataggtgtaaatcctgcgattcgatctggaccatatttttttattgtatacagtaattgtgctgcgattatctctgtaacgtctttccaatttgaacgcacgtgccctcccatacctcgggcttgcttatattgtttggctttgtcttcattttcaacaatagacgcccatgcagcaacgcgattaccattgttttcttctaatgcttcagtccataaatcccagagttttccacgaatatatggatatttgattcgaagcggactgtattcataccaagagaatgacgcacctcgtggacatcctctcggttcatattcaggcatatccggaccacaacttggatagtcagtttgttgattttcccaggtaatcacaccatttttcacaaatactttccaagaacatgagcctgtacagttaacaccatgtgttgttcttacttctttatcgtggctccaacgttctctgtacattttttcccattctctacttttactttctaggatcgaccaattcccattaaatttttctgttggcttaaagaaattcaatccaaattttcccatatttatatcctcctacgtataaaaatacgatgtgtagatgtcgtgtttttaaatactttaaaatgcccaagactattgctttaattagattgtacattttttcacaaacataaaatattagggaatcacctaattacttaaggaatttccctatcaataacgggatttcattgaaataatacacaatcatgtatggtcatgcttattgccaatctaaatcgttcaaatttggcacaacgacaaataaggcttcaacacgaatatattctctcggttgaaaccttacttattcatttattttttataaattagtgacataacactgtattagcatctgcacgatcggttgaaatatatgttacattttcttgctgcttaataaatgcatcatagtaatcatattgcgacgaatgatatgtgccattcgatgtatcatttgggtttagcaaacagccataaccttcgtcatataaatgttcacagagcataagggcgtcatgtttagaaccacttactacataaaattgcttcataggatcatatgatttaggagtgttttcagtataatcaacaacttcccctataatacatatacctggtttcgcctcaattgaatagtgttgcaattttgaaataatattacttaaacgccccttaacaacaaactcgttaaaacacgatgcttgaaagacaatcgctatcgggtaatcaatatctgtgtattgttgtatctgtgtgataattttccctaaacgttttacccccatataaattgctaacgtgccaccattcactaaggaattgacatccacttcattttcttctgaatctttaaagtgacctgtagaaaatgtcacacttttagcaactgtacgcattgtcaaacctgtctgcatagtagcaactgctgcgctcgctgatgtcacccctggtacaatttcaaacgcaatatgatgttcatttagtgtgtcgacttcttcttgcacacgaccaaatatcgctggatcgccacctttaagtctaacaaccttgttatatcgacgcgctgcttccacgatacagtcatttattttttcttgctgaatatgttttgcatacggctttttaccaacatcgataatttcagtagtcaaattcgcatattgtaaaattaacggattcactaatcgatcatatagaatgacatccgcttcacgtattaaacgctcagcctttttcgtcaaataattcggattacctggacccgcacctatcaagtaaaccttgccatattcctctacagacatatatatacgttcccgtctgtaacttctacctcataaacatctacacaaccttcatcaggttcttgaacaatacctgtatttaaatcaattttttgatcgtggagcgggcaaaatacatattccccactcactgtcccttcagacaatggtccttgtttgtgtggacagatattgtgaatcgcatgaattttgccactttctgttaaaaacaaccctacctctttgcctttgacaataaccttttttccaattaggggtgttaattcatctatagttgtcactttaattttttcttttgtttccatgtattacaccttctccacttcaaaaattctacgtgcttgcgcattgctagttattgcttcccaaggttcagcttcgactgcttttttagcatccataatgcgttcaaatagttcattttgtctttctgggtcaagtaagacttcttttacattttcaaatccaagtcttcttaaccatggcgctgttctttcagcatatatacctgtttcgcgataatattgcatcaaagcaccacataatttgattacttcatcttctgtttctacagttgttaaaaattcagctttttcaacttctgtaccaccattaccaccgatatagatttggaatccattttcaactgagataataccaaaatctttaacacctgattcaacacaacttcttgggcagcctgatacacccattttgaatttatgaggtgtatcgatgtattcaaatgttttttctaaacgaatgccaagtcgtgtcgtgtattgcgtaccaaatcgacaaaactctttaccaacacagcttttaactgagcgtgttttcttaccataagctgatgctgaacgcatacctaggtcttcccatatatttggtaattcttcttttttaactccatacaaaccaacacgttgtgaacctgtcactttaactagtggcacatgatatttcttagccacttctcctagacgaatcagttggtctgcatctgtaacacccccacgcatttgaggtataacagaaaatgtaccatcattttgaatattcgcatggtaacgttcgttagcaaatcttgattctctttcatcttcatgatcatgtggataaaccatgtttaaataatagttgattgctggtcgacattttggacatccacctttatttttaaagtttaaaacatgtcgaacttctttagatgtttttaaacctttcgctcttatttgcgttactatttgatcgcgtgtcaaatcagtacaaccacatataccagcaggttttgcggcaacaaagtcatctcctaaggtgtgctgcaatatttgagcaatttgcggtttacatttaccacatgaattccccgcttttgttttagccgttacttcttcaactgttgtaaagccattttccgtaatcgcatttactatagtacctttatcaacaccattacaaccacaaattgtttcatcatcagccatatcagcaattgatagcgatgcctcttctccacctttagtaagcaatgatacaagtgtgtaatcttcagtggattcaccttttttcatcatgttataaaagcgtgaaccatcatcgatatcaccatatagtactgcaccaactacattaccgtcttttaaaaagatttttttatagttattatcaacactattaaatatttcaatacctttaatttctgcattttctacaatttgaccagcactatacaagtcacacccagaaacttttaatgacgtaaatgttgttgatcccttgtatccgttcgtttctttatttgttaaatgatcagctaatactttaccttgttcatatagtggtgcaacgagtccataaactttgccgttatgttctgcacattcaccaactgcatatacattgctatcacttgtttgcatcacatcattgacaacaataccacgattaacatctagacctgattctttggctacttctgtgtatggtcgtatacctactgccataacaactaagtctgccggaatctcgcgtccatcagccaatttaacaccctcaacatcatcttctcctaagatttcagttgtgttggcttgcatttcaaacttcataccttgcttttctagatctgctttaagcatatttccagctttacggtctagttgcatttccatcaaccattcagctaaatgtaacaccgttacttccataccttgatctaataaaccacgtgcacactctaaacctagtaatcctccaccaattacaattgctttctttttagtcttagcaatgttcatcatttgttcagtatcatcaagcgttctccaaccaattacactcggtaatgtcgaacctggaactggaatgacgaatgctttagaacctgtcgcaaaaatcaatttatcgtatgatacttcaataccatttgcagtagtaactgattgatttgctctatctacttcaattacaggatcatttgtaattaactcgataccatgttcctcataccactcatatggattcataattgtttcttcaactgtcattttattttgtaaaatatttgaaagcatgatgcggttatagtttggataaggttctttacctattaccgtaatatcatataaatcgttggcgcgctctaatatttcttcgattgttcgaatgcccgccataccgttaccaatcattactagtttttgctttgccataaaatatgcccctttactccataatatttatttcaaaaaaaggtattaatttttcgttagtgcttttatattttcattggaatcattaagctttctaatctatcgttaatgatttgctttaaaattgggtcgaagttaattgaaggtgtgaagtgtatatctgtattaataaccatgtcattcatttgctgcttcactttgttaacaagtcttccgtcatataaaaataatggtacgacaatcaatttttgataccgtttcgagatgctttctaaatcatgtgtaaaactaatctctccatatagcgttctcgcatatgtcggcttgctaatttgcaaattttgagcgcatatttgtaactcttcgtgtgccttagtaaactttccattaatattgccgtgtgcaacaaccataactccaacttgttgttcgtcacctgctaatgcgtcacaaatacgttgttcaattaatcgtctcattaaaggatgtgtgccaagtggctcgcttacttctacctttatgtctggataccgtcgtttcatttcatgaacgatattcggtatatccttgagataatgcattgcactaaagattagcaatggtacaattttaaaatggtcaaccccactttgaatcaacgtcgtcattaccgtctctaaatcctgatgctcactttctaaaaacgcaatatcatagtgatgtatatcatcttttactaattcagaaataaatgcttctaacgcttgattctgtcgtccgtgcctcatgccatgtgcaacaatgatattcccattcacatttaccaaccctttcacacgtattgtataccaaatcattttgtttttgtgaaaagaatcacattataatgtaaaatcagggaattccctgatgcctgtagtcatgcatattccttatacattttccctttttgttaaatcaaaaaaagcgaccgatatatgaatccctactcaacatttatttgagcaagcattaatatatcggtcgcttgtagtgtatattattatcttaaaatggtggttggcctaatattgtttcgtcaaagcgctcgggtatcaatactttgcgcatgatcacacctaaatcgccatcatcattttcatgttcgctgtatatttcataacctcttttttcataaattttaagtaaccacggatgcaatcttgcagatgtacctaaagtaactgccgctgactttaacgtatctcgcaaaaatgcttcttcaacataagtaagtaattggctaccatagcctttcccttcatactcaggatttgtcgcaaaccaccagacaaaaggataacccgaaatacttttcacacttccccaaggatatctaaccgtaatcgtagatataatttcatcatcaattgtcatgacaaatgtagtatttttatctatattttctttaacagcatctaaattagcattaaccgaaggccaatcaatacctagttctcttagaggcgtaaatgcttcatgcatgagttgttgcaatttttctgcatcttgttcacttgcgagtcgaatcatcgtttttgtcatattaatccccactcttttttaaatgatttaaccatattttatttttaaaataaatatccatcaaagtgtatcaataaatttatcacatgtcagaaagtatgcttcatctgaatacaccaatactctcatgaaacttattaaaaattactctctcaacgtaaaaaaccattcaaattcatgaatggtttggaagaatgattcattgttacgctatttaatcactacatcttaattattgttgctctaaacgattacgcttaccatttaagaaagcataaacgagacctacaaaaataccgccaccgacaaagttacctaagaaagcaaaaacgatattttttaaaacgtgtaaccatgaaactgcatcaaggttaaagaataccatacctgcatatagacctgcattgaacacaacgtgctcatatcccatgtatacaaagaccacgacaccacaagctatgaagaatgcctttgttaagccgcctttgaattgcatagagatgaaaataccaatattaataaagaagttacagaaaataccttttgtaaaaatattcaaccatgttgaatcaacagtctttttctgaactaaagctgttaaagcttgtgtcatttcaggtgtcatgacatgcgcaaatttcattaagaaaaataacacaaacccacctaaaatatttcctaagaaacaatataataaaatccaagtcatcttcttaacagaaacgactttataataccagcctactgtaaagtacatgaagttacttgttaataattcagagttagttaatacaactaaaatcaaacctaaactaaacgcaatggctcccattaaattgataagtccatctacgtgagtactcgcaaactgcgtctttattccgaacataaatacagtaacgattgagagtaaaaatccggccatcattgctttaagcatatatcggccaggtgtttgctgtaccattacttgcttcatttgtactgaagatgatattgaatcaacaattgcgcctgttgaatatgtatcttcaactgttttcttattttctatcacagtacttcccccatttactttgatcaaataaaatttactttctaattatattagtaaatcaatgtaattgatagattaaatttcagaaaaatctttttattctctcgaaaatgtagttttctttcataaaaacagcgagataaatcgcgtgattggctaatatctttatgatttaagatattacgacgctcattttatctcgctttatgtaaagtattacttattcttttttaaatttgaaaagtaatgtaaaccatatgcaaatacactgtaaccaattgcagtacgtaaaataaaccttataactttattaggtacacattttgacgttactgaaatagaagatagtagtgttgtgaaaatatataatattaaaactttgatataacgttctaccatcgaatcatccctcatttttataatattacaagattattataaaccgaatgaaacaaaaaagtttttacatattttcaacaactttatttcaataaagcatcaagttgatctaaagtttgattcataccttgttcaacacccatgtttatgacttgttgagcggcttcttttgttggaaataccgatgttgatgtcactgtcgttttcgttgtattgctcttggaaaatgacaaagtaattttcatgcttggcatttttgtatcttttgcaccttgaggtgtcgcaaatgagtcaatatattcaattaaatatggacgcttaaccgttttatattctgctaatgtatagctggtcattgtaggtgttttaatcgcataaaatgcatcaccgcctgaaacagcattaaagcgaaacactttggtactagcgtcttttggatgaaaccatttttcaaataatgcttttgtcgtataggcatcaaacaccttttcaatcggtgcttctatcgttcttgaaaaaataattttattatcttcaactttaatcgtcatcttcccactccctatcttttatatttactcatcttaacatgcattgagtaacatatgttaccaaatcatttgttataaactatagtaatattaatcattccctctgttgaaattgataactacgaaataaaaaacacactctattcagctattaacagttgagtagagtgtgcaaacctgttgaattaatgcgctaacatttcttctttgatttggtctttatttaattttgaaggataatatgttggccagttatccatttcttttaataacgcgtcattatcattacccataaagatatggaagtgttctgcctttttaggtgcaatgttgtgatcgctaaattggatgaatttcggtaagtctttatcattaccatcgaccaatttaaacataaatctcacgccacggttacctttaggatatttcaatgttttcttaccattgtattcatatttaccagtgtgtttcttaccatctttagtaaatgtaatttcatttccttttatatcaatgttagtaatatcagttttatatcctttgtcataataagcttttaaatctttagcagatttcttcggatcattttcagctttatgttccatcacttcatcaagcgtaccgtcttttaagtaagggtaaacagattgccattcaccagcataatcgcttaattcacggtctttaacttgctcatctttaaaatacccatcagaaattgctttgtcatgtttactttcagctttgtcgtctttcactttaacaccactgtctaaagctttaccgatattttcaatattagatttcattaatgattgatacgtaatattatcttttttctgttgttctttatttaaagactccatgttgtagaattttaaaggcttcgcatctgtttctttacgaattgtttcagtcactttattcgcaacattatcttcgtaaagaatatatttagcattgctatctctaatttctttaacaattttagttaattctttttgtgatggatcttcagcattcatgttttgaatacctttttgaacaaaaccataacaatcagctaagtatccaattgattcatgtgaaatgaatactgcattaccttgcttatcttttgtaacttgcttcatatcgttatcaattttcttaagatcgtcgtttaattttttgtagtttttctcatagtcatctttatgttttggatcttttttcactaattcatctttaatttctttagcgaaagtttggttaattttaggatctaaccatacgtgtggatcatatccaccatgatgatgatgatgttcttctttctcatgatcatgtccctcatgttcatgctcttcaccatgctcgtgttgatcagttaaaagctttgctttatctaatttatcctctaaagacagttttttatctttatctttgatagtagatgcaactttcttagcaaccggatctaaattatcccctgtatacataaacaagtctgacttgcttgcacttaatatatctttttgtgttggttcatagctatgtaaatctgtccctgctggatagattgatgataccttcacgtgttttccaccaatttgctctgcaaatgattgcaatggataaactgtcgttttaattgttaccttgccatctttatcttttccatcatcattcccacatgcggctaatgataaagttacggctggtacaagaagtaacatacctaatttctttttcatagtcaccctcctaaatagtaatctttacgttttaaaattatatactcatgctacttaaaatacaagcactgtttttataaataatataaagtcgaatcatactttaggtatttaccacttttcgttttatctaatacatgactattgtacaaatatgatacagaaaactttatagtatttacgaacgtcataatataagaaaaaaagacaatctctatcatattgctaatagaaattgccttttcatattgtcctaaaataacttaccctatttttatagtgtgacttttagatttaataatggtatttacatgatgctatttttatatgattgtcatctactgtataaaccaatctatgttcgtgattgatacgtctactataatacccagtcagattcgattttaacttttcaggcttacctataccttccaatgcaccatttctgtcaatacttttaagtaactcattaatcttcttcaccatttttttatcgttctgctgaaaatacttataatcttcaaaggcttgaggcgaaaacgtaatatttaacctagccattatacatctatatctttcgttatagttttcccacgttctagatctgcaattgattgagctaagtgttcagcattatttgggttctgttggaggtaaagtgtttccatcatggagttataatctgattctgacatgattactacgtttttatcatcagtagatgttacagttaccataacactatcatcatttacttttgtcataagtgcctttaaattctgtcgagcgtatgaataatttttaataatcatatttatcgcctccttttaacacacctcaattgtacaaatatctgtacaataaaacaagcgacacagaaaaaaactactaatcaagatttcgcacggggaagaatcaatacctatcctgtactgattccctactaaacaatgtttacatgataatttccacctatttagacttcatacattaaaaagacaatctctatcatatcgctaatagaaattgccttttcgtattgtcctaataaattggtatcacttactgatctcaacaattaagactatttgattttatcttttaataacttctcataactttcataatcatatggatcttcaactttctcgccattaataaatgcagttggtgtcgtttttatatgattatctttcgctatttttttatctttctctgcagctttccaagacttgctatcttttgtcttgtaatcttttataattttattttccgtctctttatctaaatgcagttgtttaatatgtttatctaatagttcttttgttaaccattctttattttcatcttgctgggcagcaaataattgcttttgaaaatctaaaaatgatttaggtgcatacatcaatactgcatgactcgcacgcgaaccaacaattgagtctttacctaagaaagctaaattgacaaattggtattccactttgtgattatctatataatttttacgcaactttggcatgactttttcatctaattctttacaataaggacatttatagtcgccatatacgacaactaatggtttgccgtttttcgaagatgtcgttgctgattcttttttaccgcaagctgttaaaattaacatgctcactataaataatgttagtaattttttagtcataataactcctattcatatctagttcgtcatattttcttcatgataatccgcatcatgttgttgataatatcgtctcgaatcaaaatcttgcttatatgatacacgtttatcactaaaatcatatgcataataatgcacttcatcattactcaaaggtttataagctaaaatgataattttatccttatcatagacataaatattagcatctttgcgttcaaaatgatcaacacgatcaccgttgccttttttggcaagttgttcttgtttttgattttgaattttaactgcttcatctatttctttcacatatttatcattaccacatcctgatataaagactagtaataataataccgtcgccacaaatcgcttcaatgctcccactcctactatcaacttccaactaactttcaatataattaatactatacaccgtcaaacattaatgcgctacaactactaccaatgcatttaatataaatatccaaagaaataacagttatgtatagtcaaagaaaaatatatttcattttctatgtgtatttgtaatcagtttttgataaaataaaaaaatagcattattaataaattcaaaaattatagttcaattcagagagggatgggataaaatgaactttgtaacgttgacttcggatgagttcaatgcgtttacaacaaagcatttttcacattacacacaatcagctattcattacaatcatagagttgatttaaaaggcgatgtgcatcttgtaggggttaaagatgacaatggtcaagtgattgcaggatgcttattgacagaagcacgcacacttaaatttttcaaatatttttatacacatcgcgggccagtgatggattatacaaatcaatcattagtagcatttttctttaaagcattaacgtcatatttaaagaaacacaattgtttatatgtccttgtagatccatatttaattgaaaatttacgcaatgcagacggtgaaattgttaaatcttatgataaccgagcatttgttagaacaatggataaattaggttataaacaccaaggtttccctgtaggttatgattcaatgagccaaatccgttggctgtcagtgttagatttaaaagataagactgaagaccaacttttaaaagaaatggattatcaaacgagacgtaatattaaaaaaacatatgatattggtgtcaaaactaaaacgttaacgattgatgaaacgcaaacttttttcgacttattccatatggctgaggaaaagcacggtttcaaattccgtgagttaccatactttgaagaaatgcaaaagttatacgatgaccacgccatgttaaagttggcgtatattgatttaaacgagtatttaaaaacgttacaattaaagcaacaacaattaacagctgaactctcaggtgttgaagaagcattggaagaaagtcctaattcaaagaaaaataaaacgaaacgcacacagctagaacaacagctaaatagcaataagcgtaaaatcgacaatacaatagaacaaattgaacaagatggtgcagtcttaaacttagcttctgctttatttatctacaatgagcatgaagtttattacttatctagtggttcaaaccctaaatataatgcttatatgggtgcctaccatttgcagtgggaaatgattaagtttgctaaagcgcatcatattgatcgctataatttttatggtattaccggtgacttttcagagtcatcagaagactatggcgtccaacaattcaaaaaaggttttaacgcacatgtagaagagtatatcggtgactttattaagcctatcaaaccattactatataaggtacaaacgtacttaaatcataaacgtcgttaaaatatcgctccaagattatgacaacataacaaagaaccacgcatcatgtatatggcttcatcgccatactaaaacatgatacgtggttctatttgattattcttcatttataacatttaagaaacgtcttaattcttctgttttcggacgattgaacatctcttctggagccccttgttctccgatcatgccttcatgaataaatacaatgttattagatacttctttagcaaaacgcatttcatgtgtcacaatgaccattgtcatgccttcattagccaaatctttaataacctttaaaacatcattcacaagttcaggatcaagtgcagatgttggttcatcaaacaacatcactttagggttcattgctagtgctcttgcaatagcaacacgttgttgttgaccacctgataatgcatgtggacgttgatctttgacatgtgttaaaccaactttctcaagtaactcaagtgatttcccacgtgcctcatcctttttcaactttttaactgtgataagaccttccattacattttctaatgccgtcttatgcggaaaaaggttataactttgaaataccataccagactgtttacgaacttctatttgtgattttttatctttagatgtatatgttttgccgttaacataaactgtaccttcagttggaatttctaatgcattaatcatacgtaacaatgttgttttacctgaaccagatcgaccgattaaggttacaacctcaccttgttcaacagataaatcaatacctttgatgacttcaacatcattaaatgatttatggatattgttcaattgaatcatgagcgataccctctttcaatataagattcatagataccttggataattgaaataataaagcataccacccagtacattagcgcaactaacacataaattgttaaatattcatatgttgtagacgcaacttcttgagcttttctaaacatttcagccactaaaataaatcctaataatgatgtatctttgattaaacttaaaaatgtattacctagtgcaggaatcgacactcgaattgcctgcggtaaaatgatacgttgtatcgtttgaccatacgtcataccgatggaatatgcagcttctgtttgtcctttcggtatagaaataataccgccacgaataatttccgaagcatacgcacctacatttaatgataaaccaataatagcagccactacaggtgccaatgtccattggttgtcagcgtcatttgttaataatctacctaattctggaataccataaaatatgataaatagttgtactatcattggtgttcctcgaataatagatacatagacacgtgaaatacttcttaaaattttactcgttgaaattcgcattaatgctgtaaataatgcaataatcaatcctaaaacaaatgtaactaatgtaataggaattgaatatttgaccaaaccttctagcataggtccgaaagcttgttttgcagcatctagcgcatgttgttgttcgctatttagatttagaaacatcttgaccaaaccatttcttacctattttagctaattcaccgttttcctcgatttttttcaagccatcattgaatttttgaactgtttcatcatctgcttttttagaaaatgcaaatgcagatctactttgttcagcattacctttgattgctttgatcttagcattaggtttttgttttttataatccaagtatgacagactatcattaaatgtaccatcaacacgcttagacaataataaatccattgattggttaaagccatcaacttttgtaatatcagcacctttatccttagctaatttaccataattagatgtgaatgtttgtgctaacttcttacctttaacatcatcaaaatctttaatatctttttcattttcacgaataactaaaacagcacttgagaatgtgtaaggcttagaaaatttatatttcttttctctatcaggattaatacctacttggttcgcgattacatcaaaacgccctgcgtctaaacctgcaaacatagaatcccaagaagtttcattaaatttaagttttaaaccttcttctttagccactgctttaataacatcaatatcgtaaccagttaatttaccatctttatcgtggaaactaaatggtgcataagtcccctcagtcccaacattaattgtcttgctatctttactagcttccttgtctttcgacgaattgtttccgcatgcagccaatatgaaaacgaaagctatcatcacaaataaaagtcttttcatagaatatatctccttattcttattattctaatcggaataaaaatattttaatctgaaatgccggataagtcaatatgttgaacttttgctaaaaagctttatatagctagcaacttatatttattgacgagaatcaacttcttttttcttaccttgtaacataaatgaacaaaagaaactaacaactgtaatcaataatgcaaataaaaatccagcgtgataaccatgcaacatcgtatcaactttaatttgattcatcatatcaattttgttcatgccattatagtctgacatagttggagaaaagtttttgcttgcatgggataaaatagtaattaatgcagctgttccgatagaaccagcaatttgttgtactgtgtttgtcatagatgaaccatgtgcattcatttctggctttaattgattcatcgtatgggtcattactggaattaatcctaacgcgataccaaccattcgaatcgcataaactgttgccaacatgattgttgatgtttgttcatccattacaacaaaataagccgtagtaataacaacaatcgccatacctactaaagcaagatttctaggaccaaacttttcatataaagcacccgaagtcatcgacataaatgccataacaattgctcctggtaataaagttaatccagaatctaaagctgaacgatgcaataaattttgcacaaagataggtaaaatcgtttccgaaccaatcatcgataccattgtgacacccataataatgataccaactgtaaattgtttatttttaaatacagcaaaatttaataatggtgttgatagccgatattgacgtaatacaaataatgcgactaaaacaacgcctccaatcatagatactaatacgataggattatcaaaacctttttctgaaattgaactcgttccatacaataacccgccgaaacctagtacagaaaaaatgacagaaataaaatcaataggtactttaattgtagttccaacattttttatcgttttaaatccaattaaaaatgtcacagctgcaattggagcgacaacatggaaaagcgatctccagttaaaatattcaacaaggtaacctgaaagagtaggtccaatagctggtgctaaaccaattaccaaaccaaatatccccatatatttaccgcgttcatgtggttggaaaacatccaaaatcgttgtcatcatcaatggcatcataatacctgcgcctaacgcctgaataattctagcaactaataatgttgcaaagtgcggactcaagccgccgagtaatgtacctaagaaaaagatagaaatacccactaaaaacacttgtcttgttgtataacgttgtataacaagcgcggacaaaggaataacaatcccattagtcaataaaaaagctgttgtcagccattgaacttgtgtatatgaaatttcaaaatctttcataatacttggtaaagccgtcactaatagtgtttcatttaataatccaaaaaatccacccatcagcatagtaataatcatcgttaatttttgtttcttcgacatttaaagcttccccctcaccatctaaaaaacgacacacatttttagatatccggtaattatacccattttccaaaaaattagcacgactttattacaatttctttaaaacgtaatcattactatttacatatgagtagttatcggtcataatatatttacaaggagggatagagatgaaattagatttacagactgctcgtcgtaatttaaatagccctaacattaaaacaagaaagcgtgctttaaagattattaagcaacataaaagagcgaaataattgttttaatttgactatattgtatgtctaactatattttcgagtatccctagctcgttaatataaactctatacttaactatttccttacattacttcacatatttaagagctgcatatacactcactccttgtgtacatgcagctctttttttataagtagtatttatctataacttctaaatcatccgttaattcataaacaagcggtgcacctgttttaatttcataattaatgatatcttcatctgacacatcttcaagatatttaatcaatgcgcgaattgaatttccgtgtgcagaaactaataccgtttgaccatctagcaaatattgtgaaatatgatctgtccaaaatggtatcactcgaactaaagtatctttcagactttcagaataaggcatcatacgtttatctaaatgattatatcgacgatcagctaagtaagcttcacgttgttcttcggtttcagcaggtggtttcacatcataagaacgacgccaaatatgtacttgttcttctccaaattcttttctagcatcatctttatttaagccttgcaatccaccatagtggcgttcatttaaacgccagcttttatatacaggaatccattgttgtttagattcagttaaaatataatgcgttgtatctaaagcacgtgttaataacgatgtaaaagctacatcgatggcaatgttattttctcttactttttcacctgctctagtcgcttcattaataccttgttcagataaattaacatcttcccatccagtaaataagtttttagcattccactcgctttgtccatgacgacataaaattaattttggcataacttataacctctttcctttaatctttaggacgttatttcagggatattttaagatgatttaatcttagtaattttcttttcaatatattttaaaattcaatgattaaatcaattatcactagacattaaatacataaatcctattccccattttcattttttaattcataaatgaatcaataaccacctaataacaaatcatattatacacctttgttcgctatttttctaaggtttaaaaaatatttttaggtaaacctaaaaatagatgtaataaaaacgcctcctcagatatttatatatctatgaagacgtttaaatacattatagatggtctggttctgggtgaacgtatactgaggaaataccttttttgtgcaaatgatgttcgacattgtcacaaatttgatgcgcttctactaaggaaaggttagcatctacaacaattgtgacatcaataaacacactacttccatggtaacgccctttaatacttttaacttcttgtacttcatcaacttctaaaatatcattgcgatacgcttctaattcagtttcattgaaaccatcactcaacataaaaattgcttctttaaaaataccaaaaccagtataaacgattagtaagcctagtaatgttgctaaaataatatcgacaattgggaaaccgatttgcgtaaaaattaatcctatcgctgttccaatgctgactaaactatccgataaattatctttggcagccgaatttaaagaactacttttcgttcttttcgctagtctttgattgactgcaaatacaatcaacattacaagaccactgattaagctgacgataattgttattgcgttaggtacaacgtcatcttctttgaacaaacgaggtgcattttgaataactacttggatacctacaaacataatgacaaatgacaccaataatgaagaaatattttcagacttcaaatggccataaggatgatttcgatcggcaggtttaattgaaattttcaatccaataataacagctaaagaaacgataatatctgtcatattgtttaatgcatcggctcttacagctgcagagttaaagacaaaacccgtgacatacttaacaatagataagattatatatacaattaaactcaaataagcaccgcgttgcgccaatttaagattttcattatgagacatgcgttgaaccaccttgaattagtatagtaacaatattatgaatgattcattttaattttacaacgtttttaatttttataaatttttataaaattaaactaatttattcattcgcaacccctaaaaataatttttagcctttctgcgaattttatgagctagaaaggcgcccaactctccctgtttgttaactttcgcctcgaaagtttctatgttgggaccctatgcattagtagcgaagctatctaatgtgttcctttattttctgcgaattttatgagctagaaaggcttatgcagttgacgttttacgtccaactgcgttcctccgtcttcttcaaatttatttgttagaaaggcacccaactctccctgtttgttaactttcgcctcgaaagtttctatgttagaaccctatgcatgagttgcgaagctatctaatgtcgtgaactaattatatagaagaaaaagtgcatcaatgacaaattaaatgagatttctactctaccaaactctcttcgaaagacaattttctcctctatttattagcaaactattgcatttctccatatagtacttccttacttaaaatacgctgaatgttctgaattaaacgcttttttacatagttaacactagttaatctattagttaacattagttaataattagttaatttccatttgtattctcatgtgataaattctaaaagcatacaataaatttaatatgtaaaaagaaagggaatacacatgaaaaataaatatatctcgaagttgctagttggggcagcaacaattacgttagctacaatgatttcaaatggggaagcaaaagcgagtgaaaacacgcaacaaacttcaactaagcaccaaacaactcaaaacaactacgtaacagatcaacaaaaagctttttatcaagtattacatctaaaaggtatcacagaagaacaacgtaaccaatacatcaaaacattacgcgaacacccagaacgtgcacaagaagtattctctgaatcacttaaagacagcaagaacccagaccgacgtgttgcacaacaaaacgctttttacaatgttcttaaaaatgataacttaactgaacaagaaaaaaataattacattgcacaaattaaagaaaaccctgatagaagccaacaagtttgggtagaatcagtacaatcttctaaagctaaagaacgtcaaaatattgaaaatgcggataaagcaattaaagatttccaagataacaaagcaccacacgataaatcagcagcatatgaagctaactcaaaattacctaaagatttacgtgataaaaacaaccgctttgtagaaaaagtttcaattgaaaaagcaatcgttcgtcatgatgagcgtgtgaaatcagcaaatgatgcaatctcaaaattaaatgaaaaagattcaattgaaaacagacgtttagcacaacgtgaagttaacaaagcacctatggatgtaaaagagcatttacagaaacaattagacgcattagttgctcaaaaagatgctgaaaagaaagtggcgccaaaagttgaggctcctcaaattcaatcaccacaaattgaaaaacctaaagtagaatcaccaaaagttgaagtccctcaaattcaatcaccaaaagttgaggttcctcaatctaaattattaggttactaccaatcattaaaagattcatttaactatggttacaagtatttaacagatacttataaaagctataaagaaaaatatgatacagcaaagtactactataatacgtactataaatacaaaggtgcgattgatcaaacagtattaacagtactaggtagtggttctaaatcttacatccaaccattgaaagttgatgataaaaacggctacttagctaaatcatatgcacaagtaagaaactatgtaactgagtcaatcaatactggtaaagtattatatactttctaccaaaacccaacattagtaaaaacagctattaaagctcaagaaactgcatcatcaatcaaaaatacattaagtaatttattatcattctggaaataatcaatcaaaaatatcttctctagttttacatcattttttaaataattttcgtaacaaaccgtgattaaaaagaaccgttgattctcaatcgaatctacggttcttttttcattttccatcaattaaatgcttcttcgctatttgtcagcccacttttttacctgcaacttgttaaataatccttacatcgttaacgaatagttcatcatttagttgaatcagctcaactttattaacttcatattttcacaaactattgcgcaatccattccttttccactacaagcaccataattaaacaacaattcaataaaataagacttgcaaagcatagttatgtagctatataaacgcctgcgaccaataaatcttttaaacataacataatgcaaaaacatcatttaacaatgctaaaaatgtctcttcaatacatgttgatagtaattaacttttaacgaacagttaattcgaaaacgcttacaaatggattattatatatatgaacttaaaattaaatagaaagaaagtgatttctatgattaaaaataaaatattaacagcaactttagcagttggtttaatagcccctttagccaatccatttatagaaatttctaaagcagaaaataagatagaagatatcggccaaggtgcagaaatcatcaaaagaacacaagacattactagcaaacgattagctataactcaaaacattcaatttgattttgtaaaagataaaaaatataacaaagatgccctagttgttaagatgcaaggcttcattagctctagaacaacatattcagacttaaaaaaatatccatatattaaaagaatgatatggccatttcaatataatatcagtttgaaaacgaaagactctaatgttgatttaattaattatcttcctaaaaataaaattgattcagcagatgttagtcagaaattaggctataatatcggcggaaacttccaatcagcgccatcaatcggaggcagtggctcattcaactactctaaaacaattagttataatcaaaaaaactatgttactgaagtagaaagtcagaactctaaaggtgttaaatggggagtgaaagcaaattcattcgttacaccgaatggtcaagtatctgcatatgatcaatacttatttgcacaagacccaactggtccagcagcacgagactatttcgtcccagataatcaactacctcctttaattcaaagtggctttaatccatcatttattacaacattgtcacacgaaagaggtaaaggtgataaaagcgagtttgaaatcacttacggcagaaacatggatgctacatatgcttacgtgacaagacatcgtttagccgttgatagaaaacatgatgcttttaaaaaccgaaacgttacagttaaatatgaagtgaactggaaaacacatgaagtaaaaattaaaagcatcacacctaagtaaacagttcaatcatcttaaaaaatcctgggacacttcatacttgtctcaggattttttaacaaattgaatcagccttataacattaaattattttatcgtacattaaatttaataataacaactgatttttataagaataaagtatcgaaccatagtagatacacaaataatacaaatgaaacaatttaacttgaaagcttaaataaatattatcaagttaataaacaattaatttttagatggattcatcaaaaatcgtaaaaagcacaatttgtattttacaaacattaattaaaaaagaaagcaagacattcgtgcaatcggttaccttaaattgtttacaactgtcaacaataccaaggttttattaactatatttctcacaaaattagcttttagcattccaaacaaaaaaggttaaatcgaacggaattatggcatttttaacttaattgtaaaaaaagttgataatggtcaattgttaatgaacagttaattataataacgcccaaaatatattattatttaattaagttaaataaaattatagaaataaagtgaaacttatgcttaaaaataaaatattaactacaactttatctgtgagcttacttgcccctcttgccaatccgttattagaaaatgctaaagctgctaacgatactgaagacatcggtaaaggaagcgatatagaaattatcaaaaggacagaagataaaacaagtaataaatggggcgtgactcaaaatattcaatttgattttgtaaaggataaaaaatataacaaagatgctttgatattaaagatgcaaggattcattagctctagaacaacatattacaactataaaaaaactaatcatgttaaagctatgcgatggccattccaatataatattggtttaaaaacaaatgataaatatgtttctttaattaattatttacctaaaaataaaattgaatctacaaacgtgagtcagacattaggatacaatatcggtggtaatttccaatcagccccatcactcggtggtaatggatcatttaactattctaaatcgattagctatacacaacaaaattatgtaagtgaagtagaacaacaaaactcaaaaagtgttttatggggcgtcaaagcgaattcattcgccactgaatcaggtcaaaaatcagcctttgatagcgatttatttgtaggctacaaacctcatagtaaagatcctagagattatttcgttccagacagtgagttaccacctcttgtacaaagtggatttaacccttcatttatcgccacagtatctcatgaaaaaggttcaagcgatacaagcgaatttgaaattacttacggaagaaacatggatgtcactcatgccattaaaagatcaacgcattatggcaacagttatttagacggacatagagtccataatgcatttgtaaatagaaactatactgtgaaatacgaggtcaattggaagactcatgaaatcaaggtgaaaggacagaattgatatgaaaatgaataaattagtcaaatcatccgttgctacatctatggcattattattactttctggtactgctaatgctgaaggtaaaataacaccagtcagcgtaaaaaaagtcgatgacaaagttactttatacaaaacaacagccacagcagattctgataaatttaaaatttcacagattttaacatttaatttcatcaaagataaaagttatgataaagatactttagtacttaaagctactgggaatattaactcaggctttgtgaaacctaatcctaatgactatgacttttcaaaattatattggggagctaaatacaatgtatctataagctcacaatctaatgattcagtaaacgtcgttgattatgcaccaaaaaatcaaaatgaagagtttcaagttcaaaatactttaggctatacatttggtggtgacattagtatctctaatggtttatctggtggacttaatggaaatacagctttttctgaaacaattaattataaacaagaaagttacagaacaacattaagtcgcaacacaaattataaaaatgttggctggggagttgaagcacataaaattatgaataatggttggggaccttatggaagagatagcttccacccaacatatggtaatgaactcttcttagctggcagacaaagcagtgcatacgctggccaaaacttcatagcgcaacaccaaatgccattattatctagaagtaacttcaatccagaatttttaagcgtactatcacacagacaagatggcgctaaaaaatctaaaattacagtaacttatcaacgtgaaatggatttataccaaattcgttggaatggcttctactgggcaggcgcaaattataaaaactttaaaactagaacatttaaatcaacatatgaaattgattgggaaaatcacaaagtgaaattgttagatacaaaagaaactgaaaacaataaatagctagtaaaacacggtcgccaacagtaattgtgacgaccgtgttttgatttattatcttagtaatactgccattctttttctcaatgtgagatataaaggaatagctacaattaaagtgaatattacgcctggaatcgcgtttaacaacactacccacacaggtaaatttaaaataatagataatagtagcctagataccaaactgcctaatacacttgctaaaactaatgatagtacatttattttcaataaataaacaactgcaatagctataactctaaatataatagagataatcacattaattggattaaatacgccaaatactagtaataataggctagataataatccacctaaaaagtactttttaattccaaagaaagctaatatcaataatgctgccggtgcagataattgaaaatctaatcctggtataatggacggtattttcaaaactgccaaaatggttaaaatcgcagcaatgacactaatttgagtaatatcttttgatgtcatactaaaacccctataccgtttcataaacaacttgcttcggtgtgctttctaaaaatgatatgtaatgatttaaatcaatacaatcgtccacaaatattattctgcctccatatctcgtattaactggtttaatatcaaataatcgatggtaaccaattttagcagcggcaaaataacctgtcgtatacgttaagtcatcggacacgcaaagttctcctttgacatacggatgcgcattgatacaactagcaattgctaaggcatcagtcactctttcattaagatcacctttattatttatatcttcaaacgaaaaatgtgttgccctaatccccctttgtccaaatgaatctaaacgtttaccagatatagcagatagaataatagctcctgtataaaccgtttcatttttaatatatgtcatcccttgatttagcgcttgttcagtgacaccacattcttgtgttaaatgttggagatttgctttatcatcctcaataatttgtaatgcttttatttgttgaatcggttccatgattttttgtatttttatattgagaaaatccggttgcccattttcatgaaaaaaacctttattataaaacctttgtaccgtctgttctattttgtcaaactcacaaatcgtttcagcaccactaatatgaacatcttgattgctagaacgcatttttatactatacatgacgatcacctcaatcttcttgatgcaaaatttcaaacaacctatctatatcttgttcagtatgaaaatacgacaatgatattcttaacattggcttagtcacagttggataccttaaataacttgtaaacacatgatgctttaataatgtttgatgaatgttctcagccgcttctatgtcatcaaactcaataaacttaatcggcgagtttgaactattataattaacattgagtgcttttaacttttggttaaaatatttactcaaactatttaatttagtgcgtctatcatcagcatttattaacttttcaatgtttctttttataaaatacaaattataaattggcaaactacttgagtagatgagtggtctaccgtgattaattaacatatccttcacatcatttgaacttaaaatcacacccccgtatgcaccacatgctttagataaactagaagtgagtatatctacaccttgataattcgagtaattctctattccaaaactatgtgaaacatcgagtatcagtgttgcgttatatttatgctttaatgagactaattgaccaatatccacaacgtcgccattcgttgaaaatacactatcagatatgattatttttggtatattttgattagggtatttctctaaccttttttctaaatcagcaatatctaaatgcttatatatcactttttctaaaccacttaacttaataccgtcaataatactcgcatgattttcttgatctgaaaacacgacacaatttgtatttttgaaaatattaaataacgccaaattagcatcataaccactatttaagatagtacatgcactatatccgagccaacctgctaacattgtttcaatttcttcataagctgtcgaacttccactaattaatcttgaacttgataagtgataactatacttccgcataaatctttcgaaatcatccttatcaaacgctatttgacctaatcctaaataatcattagatgtatagttcgtacatctcttattttctacttcaatatactgtctatctatataccctaccgatttaagcgaccgatataaccctttctgttgtaataaatcaatttgctcttgaaacttcattcttgttttccttattttcacaagtgtcataatcaatttcaaagcctaaatcattaatcatatcgtagtctaattggttcggttgcccaccagtaattagataatcaccgacaaatattgaattcgccgcttttaatgctaatggctgtaacgaacgtaagttgacctctcttcctccagcaatacgaatttctttcgtaggattgattaatcggaataatgctacgattcttaaacatttcattggtgttaaatcatccatgcttccaaactttgtgcctttgattggatgcaaaaaattaatcggaatactgtcggcatccatttcttttaaagcaaatgccatatcaacaatatcttgattagattctcccataccacaaatcacgccagaacatggtgatatattattcgctttcattagttctatcgtatctgttctatctttataactatgcgttgtcacgacgttatcatggtaattttcacttgtattaatattgtggttatatctgtctacaccagctgacttaagtttcttagcttgttcgtcattcgttaatcctaaacatgcacagatttttagttgcgggtgttgagatttaatcgttcttacagtattactaatatgatcaacttctttatcgctcggtcctctaccactcataacaatacaatatgttccaatatgattatcatgtgccacctttgctccatcgataatttgttcctctggaattaaagcatatcgctgtttttgtttaatatctcgtgattgtccacagtacccacaattttcaggacatataccacttttagcatttaaaatcatgtttaattttacttttttaccaaaataatgttttcttaaaatgtacgcctcatttaataaatctaaggtatcaatattagtatcctcataaattttcaatacagtctcttttgttaattgttccccttgtaatatgcgtttagccaaattcatattaacacttcctatctaaaatgttatgtactgcctttttaaaaatacgtaccatcgttttcacttctttatttgacatacttaacactggcacaaacgtaatgacattttctaaatttctaatcattagcccgttttctttacaattacgtacaatacgttcaactttttcaatttctaacggcgttttactatctttatctgtaactaattcaactccaaacattaagcctcgtcctcttacatcaccaacatttcgatgacgcttcagcgcatgtaactgtttctcaagtgttgatgatgtcgtttcaatatgtgacaataacttacgtttttcataaagtcttatattttctaatgcaaccgtacaaacgatttgatttccggtgtatgtatgaccatggaaaaaggtattcacaccatgcgaatcacttaaaaatgcattgtatatttttttagatgtcaatgtagctgcaagtggtaagtagccaccagtaatcgccttacctaaacacataatatccggttgaacatcttcatgattgcatgcaaacatctttccagttctcccaaaaccaactgctacctcatcacaaattaataagacatcgtattttttgcacaatttctcgacttctttcaaaaagcctttaggatgaacaaacaagcctgtcgcaccttgaatcaacggttccaatataaaccctgcgatttcatcatttctttcaattagaatttgctctatattcgttaaaatagctgtcatcatttcattttcagtatcgtaattactgcgatagaaagatgggctttctacttgaatattctcaaatattaagtctttaaatattttatgaaaggtcttgataccaccaacacttaccgcaccaatcgtatccccatgataaccgtgatttagcgttataaacttgtttttcttggcatatttttctctatcaatatttttccaatactgatatgccatctttattgcgatttcaacagacgcactgcctgtatcagaataaaatacttttcttagattacttggcgtgatttcgattaatttttccgcaagttctattgacggaatatttgatgatcctagcagcgtagaatgggcaattttattgagttgctttttaattaccttatttaagtatttgttattatgaccatgcacattgacccacaacgatgcataaccatctaaatatttattgccattcgtatcgtaaaggtaactaccctttcctttttcaatgatgattgcttcttctttgctatatacacccatttgtgtaaatggatgccaaacatattctgagtctttttgtttaagttgttgtgtgtaattcatttttaactcctattaattgttttaaaaatgcttctgagaaattttcatacgtggcatgttcttcaaatgtatagactgttttatttgttaattttccaatcgtcatttgattgtctttttcaatatagctgtctgtatagcgattcattattaaaaaattactcgccgatacattctgattaacataatcttggtgaacaatggcatcgctaatagcacctaattttgatggcaacacactgatgacacaatctgcacaatcattgattagatctttagtcatgtagaaatcatctgtaccttcatatattggtacggcaattcccccagcaccctcaattaagataaaatcaaattccttatctaaaacttttaccttatctaatacacgctgcttatttagaaaaatttgatctgtcattttaaatgcaaggtgtggtgatacaggttgcttaaaagtataaagtgacgttatgtcatagcttaaatcacattcatttttaaatacttctaaatctggaaacgtcccgtcttggcgttcctcagtttgaaatggtttaaaaatacaaactcgatgaccacgtgttttcaaagcatggtataaatgctttgtaacataggttttgcctacatcagtattcgtacttgtaataaaaatcctcataaaaataaccacctcaatccaaatgtaaacttttataattaataagtttacatttaaggcgcatgtttttcaagaaaacatgaatttaaacttctcagtataactataaattttggcaaaattttgaccttgctattgaaatgactaagacttcttaaggaattcgggcagatataaacagcgattcgataaaatatgtcagttaaaattaataattgcattatttcttaataaaaagacatcctagctttaccatcttgtgaaacaatccattaattgtaatattacgttgagcgccttgttcatcaatgctataattagttacataataaattgaacatctaaatacaccaaatcccctcactattgccctagtgaggggatttattttgctgttgattatctatcaccctttttatttccaaattctgattccatattaaactattatttataatttccagcctgctgatttactttttattcttataaagtcttgatacattcctggttttcgaattaattcatcatgactacctttttgaattatttcaccttcattgagcactataatctgatctgcatttttaatagtttcaagtttatgtgcaattgtaattactgttttgcctttacttaattcattaattgccgtttgaatcagctgttcattttcagggtcaatacttgcagttgcttcatctaaaataattattggtgcatcttttaatatcgccctagcaatagaaatcctttgcttttctccgccagataaattactacctttttcatttagcattgtttgatatccctcaggtaatgacatgatgaagtcgtggcaacatgcttgcttcgctgcacgaataatttcttctttcgttgcacctggattgccaaacaatatgttattttcaatcgtatcattaaataaatacaccttttgaaatactgcactaattttcgacattaacgtacttaatgtcatatctttaatatcaacaccatcgatgcgaatatttccatcatcgatatcataaaagcgcaagagtaagtgacataatgtagatttcccacttcctgaaggtccaattattgctgttgatgtttgtgtaggtatctcaaaattcacattctttatcacttgtttatcatcatatgaaaagttcacgttttgaaaagcgatattttcatttttaatcgtcaaattttttccattctcatccagttctggagcattttttatcttttcaatatcatctatcgtcatatctatcatttcaagtacgtgtgcagcactattaatattttcaacactatcaaatatcacaaatgaaaaaattgaaatcataataagggtaggtaaatcaatactatgattcatatataataagcatgcaactaatacaatcattattgaaacaacttttaaactaagtaaatgcaataaattgaatgggatatattgcatttctatttttgtatttatacgtttactttcattgactgcttggttaaaacttttaagactcgtattttctttcgcgaatgattttattacttgaataccacgaataacctccaataccttttccactaattggttttgtacattatgatacgctggcgcattttgtcgactctttctttctaataattgaatcgcaaaaaatgatagtaatacgccaatgcatgctaataatgatacttgccacgaaactacaagtagagacaatatgagtactgtaattaatatgtatccattaacaacaacgtccaccattttcatagcaaagttttctaaaaaggttaaatctgttgttactattgttgttaactcatttgaatgatgcgaattaaaataacctaaccttacatttttcaatttatcccctatatctaaacgttctttcgcactcatttcataagcgatgctctcatggcttttgcttttgaaatatgctgtaataaatcgtccaatcactaataaaaccatgataattacaacattcaatatatctttcatataaataggtttatgagatagcacattattaaatatttttgcagctaaaaagataggtaacgcaataaaaatagcatttaaaaatgacatgctaaatcctaaaatcattcttgctttatatggtcttatccagtttaaaattttaaatgtaatttgaaacatatttgacctccttttctcattagtttaattatgtccagtattgattccccaatcttttgtatgcatgtgcgtatcccacattttcttataattaccgtttaattttagcaataagtgatgtgaccctttttctaaaatttgttgtttacctaaaacaataatttgatctgcatgttgaatcgtagataaccgatgtgcaataacaatcaatgttttatcctgcgtcaacacatttaatgcttcttgaattttttgttcgttgtctggatcaacgtaaacagtcgcttcatctaatacaatgataggcgcatcttttaatatcattcttgcaatagtgactcgttgtttttcaccaccagacaatttatctcccactgtaccaacattcgtatcatatccatctggcaacttttcaataaattcatgacattgtgctaacttggcagctttttcaactgcctcatccgtagcttctggattgccaagtttaatattttctttaaaagtaagatttaataaaaagttatcttgtccaacaaaaccaactaaatcgttaagttgtttcgattcaatatcttttatatttataccgccaatcgtaatttcacctgaagtcacatcccagtatcgtgatataagcttggcaatggttgacttaccgctaccagatgccccgacgatagctgtgaaattattttctggtactgtaaatgataaatgcttaaagaccagatcgtccttatctttgttatatgaaaatccaacattattaaaagcaatttcataatgttgaggcttcttaaattttgttgacaatactaactcttctagacttaatatttgattcacttcagttaatgcgtattgtatagactttaaatgatttacataattagtaaaattcttaatcggtgctactacacctaaagataatacgatgcataggaaaaattccgcatagtttaattggttgatagatatcaaatacatgccgaccggtaaaatccctaaaaatgttgaaggtaatacactagctcctaaattcatatacccccatgtatttttaaaccaattcaaagtgtgaatcttataattatctactgcatctttatattttttatatgaactttgagattgattaaatgttttaatcacttcaatgccttcgataaactctacaatcgcgctattcatataattattcgatttcatttgttcagcatatgtctcattaaatccagacataacttttttaaaagcgaaaattgaaattggtatcgttactaataaggcactagccatacgccaatcaatgagcattatgtataaaaagatagcagctgacaaaagtaagtttcctataacttcaggaatcatatgtgctaaaggtaattctattgtttcaaccttatcgacaaatatattttttaattcacctattttcttagattccactacgcctaaagggagacgcattaatttttgagctaattttttacgaatttcagataaaatttcatatgccgtaatatgtgatagcatcgttgacgctccaaaacaacacacttgtgaaatataagcgattaaagcaataaagatataaaccataatcgaattaatcgtatatgtattgttaatcatcattaaaataattttaaatactgcccaataaggaactaatccagaaaagacactgatgatagacaacaaaattgataacataattttccatttactatcagaagcaaatccgctgagtatctttatccaatttgtctgattgttcatcgtatatgtaactcctttcaattaataatctaaattaagccgcttatattatttatttcactggatgatatacataatataaatttgttatttgttaaaaattaatacttattacaagtacatcatatattagttgataacgattatcaatgtcgcgtggatttgtgacacatttcttttaaaaattcacaaggttatggggcagaaatgataaagagccactaatgatttattatgtagtggttctgggagtgggacagaaatgatattttcacaaaatttatttcgtcgtcccaccccaacttgcattgtctctagaaattgggaatccaatttctctttgttgggtccctgaatatagccttgtagagtctagtacattgatttgtatcccaatgtccctataattgattattcgctttatctaatgatcctatgactcaactattaaatcatttttcgaaatacttaattctaatataattaaattcatttattgtaatattgcaaaaatacattgcacaccttgttcatcaatgctataattaattacataataaattgaacatctaaatacaccaaatcccctcactactgccatagtgaggggatttatttaggtgttggttatttgtcaccttttttattgttgcgcgttcgtaaccaatgtgcaaaaaacgcaacaagacagccgcttatagctgaagtcatgatgttaattaataaattgaacatccgtcatacacctcctctctgcgttaaagtaacgcccgagatgttaggcgaccatcatattatatcatttatttattatatttcacgcaatattaaggcttaagtaaagttttttttagtggtttacgctactttaattgctatcttttaaaatccatttagataatataaatgtgatgggtatcgtaataattaaaccagcaaatggtgcaatttctgctggcaaatttagccaggatacaaatacatataataaaactgtttgtaagcttacgttgacaatctgcgtaattggaaaactaatgaattttctccaagtaggttttaccctgtaaacaaaataacaattcaaataatatgaaatcacaaaagcgactagaaatccggtaatatgactaatcatatattcaatgtgtaataattttaacagcaataaatagacaacataataatttaacgtattaatgccgccaacaatgataaattttaaaatttcagcatgcgtttgtgttagtttcatatgtgtaactcctcaacatcaaaatatatgcataactacgttctcgaacatactcgaatatgcgagccaatccgcttcacttcaaatatgcttatttcaatctttataccctttcacagcaaatttagtctctttcccctcatccttatacgccattataatgtaactgatttatcgcgtgactcattagcactatagagattactttagttcactagtaattttatatacaataagagcgacaacagtaatgagaggatgtctactatgcaattacaaaaaattgtcatcgctcctgactcatttaaggaaagtatgaccgcacagcaagttggcaatattataaaacaggcttttactaatgtttatgggaatacccttcattatgatatcattccgatggctgatggtggtgaaggtaccacagatgctttaatgcatgcaacaggtgccactaagtatacagtcatcgttaatgaccctttaatgcgacctattgaagcatgttatgcacgcgcagacgaacaacaaattgcaattattgaaatggcggcagcgtcaggtttggatttattagaaaaagaggaacgtaatcctttatacacatcatcatatggtaccggtgaactaattaaagatgcattaaatcatggtgctaagaccattattttagggattggtggcagtgcaacaaatgatggtggtacaggtatgctaagtgcactaggcgtaaagtttactgatgtaaacggggacttattacaaatgaatggtgctaatcttgctcacattgcacaaatcgatataaccaatctagattcgcgattaaaagaggtgacctttaaagtggcctgtgatgtttcaaatcctttattgggtgaaaatggtgctacctatatttatggtcctcaaaaaggcgctgatgcaaagatgataccaaagttggatttcgcaatgtcgcattatcatgataagataaaaatgtgcacaggaaagtccgttaatcaaataccaggttctggtgcagctggcggtatgggcgcagcattattagcgttttgtgagacaactttaacaaaaggtattgatgtcgtctttgacattacagattttcatcaaagaattaaagatgcagacctcgttattactggagaaggacgcatggattatcagaccatctttggtaaaacacccgtaggcgttgcgttagctgcaaaacaatatcatattcctgtcatcgcgatttgtggcagtctaggcgaaaattatcaacatgtttacgatttcggtattgatagtgcctattctataatctcttcacctagcactttagaagatgtcctacaaaatagcgaacaaaatttattaaacactgcaactgacattgctcgtattctgaaattacaataatgtcaaagtaaatcatcagctttattatttgcagttaaaacttgaatgaggtgaaacccatgaaaagaactgataaataccgtgattcatatcaatacgacaatcaaaaccaaaatcatcgtcgtcaatctgaagacgcatcgtatagacaacaatatgctaaaggcgatcctgaagaacacccggaacgatactataatggtagagattatcgaagagaacaaattcttgaagaagaaaacgagaaatcccgccgttcaaaaaaatggttatatatcattattgccattctcttaattattgtcgctatttttgtcacacgcgccttacttaacaatgatagcgataaagttagtaatgaccctaaagtctctcaaaattataaaaaacaagttgaaaatcaagacggccaaattaaccagcaagtagataatgctaaagaaaatattaaaaacaaccaaaaaactgatgacattattaaaaatttacaaaatcaaatcgacaacttgaagcagcaagaacaaaacaaagctgattctaagctaactcaattttatcaagaccaaatcaacaaattgacagaggcaaataatgcacttaaaaacaatgcaagccaaggtaaaattgaaagcatgttaaatgatattaatacaaaattcgacagtattaaatctaaattagaaagcttatttaaagatgacaatggtggcgctaattaattattacacctgctttgatgataaacattaattccctatactttatctgtatcactacgttattcgtgatgatgcattaagagtatagggattttttatataaacttgtattctaagtacatacaaatacacacaaaacgtatataatttatataattatatcatttaaaggagtctgatcatgcaatcaacgaaaaccaaaacgaagcatttttcatttttattgctaattacgttaggcgtcatgaccgcttttggcccactaactatagatatgtacgtaccatcattacctaaagtgcaaggtgattttggttctactacatcagaaattcaattaacattatcattcacaatgattggtcttgcactaggccaatttatctttggacctttatccgatgcttttggtcgcaaacggattgctgtatccattttgatcattttcattttggtatcaggtttgtctatgtttgttgatcaattgccattattcttaactttacgatttattcaaggtttaactggtggtggcgtcatcgtgattgcaaaagcctctgctggtgataaatttagtggcaacgcactcgctaaatttttagcatctttaatggtagttaatggcatcatcactattcttgcaccattagccggtggattagctttatccgtagcaacatggcgttctattttcacaattttaactattgtggcactcatcattttaattggcgtcgcttctcaattacctaaaacatctaaagatgaattaaagcaggtgaattttagtagcgtcattaaagattttggaagtcttttgaaaaaaccagcatttattattccaatgctattacaaggtttaacttatgtaatgctatttagttattcatctgcatcgccatttattactcaaaaattgtataatatgacaccccaacaatttagtatcatgtttgctgttaacggtgtaggtttaatcattgtcagtcaagtcgttgctttattagtagaaaaattacatcgccacatattattaatcattttaactattatacaagtggtaggtgttgctttaattatcctgacacttacattccatttaccactttgggtcttactcatcgcattcttcttaaatgtgtgtcctgtgacgtcaattggaccgcttggtttcacaatggctatggaagaacgaacaggtggcagtggtaacgcatcaagtttacttggcttattccaatttatcttaggtggcgctgttgcaccattagttggcttaaaaggcgaatttaatacatcaccatatatgattattatcttcattacagccattctattagtcagtctacaaatcatttactttaaaatgattaaaaagcaacatgtcgcataacacttcaacataattagaaccctagcaaagatatctatctttgtcagggttcttctttatgaattatgagatcgaatcttcaactaaaattacgccttcatagcaaggacatttctattcaatcaccctttaacaggcatccaaatttctgtaatatatttttcacttgtagtatcaccatcctgatacaactcaaaaaatggtgctgattttaccgtatctgcttgatattgatgtatgtagtgatgaacctcttccattttttgttgaactgctttaggtactgcgccctgtgcttcaaataccatatactttgaacttgctaatgttatgacatcatatttttcaatatcagcactattatctccggtaactgcaatcatatatgacatcttaccgtctaattcaggtatacataagccaagtatcccggctaaatcaccattattttttaactgtaaatccgcaattactccctcttgataacatctttgccaaaaccctgctatatgttgctgagcctgtcgtccattttcatacgtttctttaatacctactaacgttaacgacgcaagttgttgtaattgatattccattttatcactccattaattttattcactcatgtaaaacatatgtttaggacattttgcattgacgctatataattatattaaatatttattgaatcaatgcgaggactatattatgaaccgaaaaatattaccagttaaacctatcagtcagctatttcctatccctatggtcatggggtgtgaaggtgtttccgcagccatgatgttgcaatacaacaaccaacatatccctgctacagaaattatgagacattggccgacacatccgaacaatccacataaaggttatgttggacatcacttattcattaagcttggcaattatcatcaaacgatatttccagaagcatatgtaccatttttacaaaaatacaatcctaatatcgtagacggcactggtaaatcgttagaagatcttaaaggtattatcgatcaaggtcaacctgtgttaatataccatactaatcttggttctaaaccattactacgtgttttccgctttgataacaagccagcgaaacaagtttcaaatattcacgtaacgttactcattgggtacgatgattactattactattatatcgatccactttggagtcatattcgtcgtggcctagttttacctgccatcattccaaatcgcaaacaaattattaaaattcgtaaagagaaaatggaatacagctttaattcaccaggaagaaagtgcatttatgtgcaaccacattcatatacaattgaaaatcagcaacaaaataaacacacgtaagtaaacacattactcgcgtgtgtaaaacataaaatgcgcaaactgggtcaggtttgcgcattttaaatttctattatttgtatcgtctcatttatttcctggtaaatatcttctgaacgccattgtcttggatagcctagacacggacagagataacatctgccatcatctatcacacttttacgaaaatgaacatggcccataatactatatggtatatcgaacatcgcatacaaaggattgaaatcacttgtcccaataaatgcattataaaaatcgaatatacgatgcggcataggaacaatgaaatcagggtgcgtcacaacatgtgtgactaaaatcactcgtctatttcctacttctaatatatctttcttcacttgttcagccgctattttagataaattttgatctgatatgccccaagatattcgttctttatcttgccaagtcgcaccataatgttttcctttttgtaactcatctaatgaaaatcgttgtgctgcaaagctataatcataccagccagtatgtcctatgattgcccattcttcatttactataaatggttttcctaccaagcactgtgacatactcttataattattccaaatgtcttgcgtagtcatactttcaacttcccataaatcatggtttccaggtacaaatttcacaggtatatctaattgttttgtcaattgcgttataaattggtgcgtcaattgataatgatttgagatatcccccgcaatcaacaatatatccaatttcttatacttaactatttcaaccaatgcctctaagtaatcttcggatgtttttttattatgacgatcaatatgtaaatcggcgattgtccctatcttcatacccttaccttctttactcaaattaaaatgttatttattatgccatagcttatctaatatatatagttaactgcttcatttagatgattattttatatttttgcataaaaacttatatcttttcaaaaaatcgataagttttagttatcatacccttacctatcaaatgttttttcttatatttaaaaaaataattgctttattaaatggatttctttagtatttataattaagaaaacgcttacacacaacttttttatttgctttatcctgaggaggaaaattatggcaagaaaattgcatagagagttgaataacagacacatccaattaatagcaattgggggcgcaattggaactgggttattcctaggatcaggtcaaacaatatctttaactggtccatcactgttattcacatacatgattattggggttgtactattcgcttttatgcgcgcattaggcgaattgttgttgagcaatacaagatttaattcatttgttgatattgcaaatgaatatttaggcccttttggtggctttgtcattggctggacttactggttatgttggattgtatcaagtatgtcagacctaactgcgatgggacaatactttgcattttggtatccacaagtcccaaattggattaccgtgctatttattgttttaatcttgattagcttcaacttattaggtgccagattatttggtgaactggagttttggttctcgattattaaagttgtcacaattattgcgatggttatcgttggtcttgtattaatctttttctcatttaaaacacattatggacatgcatcattcacaaacttaatcagtcacggtggcatgttccctggtggaacatttggtttcttaatgtcattccaaattgctgtatattcattcattggtattgaacttataggtgtaactgctggtgaaacgaaagatcctgaaaaaaccttaccgaaagcaattaataatgtacctatccgtattttattattctatatcggtggtctattagtaattatgtcagtcataccttggaatgatatcgatccaaatagtagccctttcgttaaactctttacattaatcggcgtaccatttgcagcaggtgtcgttaactttgtcgtgctaactgccgcggcctctgctacaaatagtggtatctattcgaatagtcgtatcttattcggactgtcacaacaagggttaggtcctaaagttttaaataaaacgaatagtcatggcgtgccttatttatcaatgttagtttcatcaattgcattacttatagcagccttgttaaactacattttccctaatgcaattcaactattcatatacgttacaacgttatcaactgtgttgtttttagttgtttgggcaatgattattgtcgcttatctaatgtatttgaaaaagcatcctgaggcacataaaaacagtaaatttaagttgattggtggtaagcctattgcttacattattctagcgttcttcttctttgtattcattttattattctttagtgacgaaacaagagcagctatttatatttcgccattctggtttatatttttatttttcttttataaaaaatacaaaacgaatgctgaaaagctcgcgtatgaacaacgacaaaatgacagcggtcatttcagatatgacaatcaataatttaaacatctcgctctagtatcagttcaaccgatactagagtttttttgaaaataacttcattttatcaatatatctatgtcattatgccttaaaagtgataaaatattaactattaaaattttgaggagtattgtatggcactattagaagcatttttaatttttatttttgctgtgattattagttcggttatcaataatcgattcccacaaattcctactgcctttattcaaattgcattaggtgtcgttattttcattattccaatacaagttgatttccaattcaattctgaagtatttatgtttgccgttatcgcgccactactttttgtggaaggtacccacgtctctcgaacaaaattattagaatatcgtaaacctatactattaatgtcaatggcactagtgtttgcaactgtagtcggtgttggctattttatacattggatttggcctgccttaccaatgccagccgcttttgcaatagcagcaattttatgtcctactgatgcagtagcagtatctgctattacacgcggaaaattattacctaaaggttctatgacgattttagaaggtgaatctttactcaatgatgcagcaggtatcatttcatttaaaattgctgttactgcattagtaactggtaccttttcattattccaagctgttgaacaatttatcatttcaacaatactaggtgtacttattggtgcaattattggattcgttgtcgttagaatacgtatagacttaaccgctaataaaggtttaaaagataacaataccttaacttttattcaattattaactccttttgtcgtatactttttagcagaagaagttcatgcttcaggtatcattgcagttgtaatcgcaggtctaatccatggtttagaacgcgaccgtttaattagagcacaaacggaactacaaatgaattaccatcaaatttggaacacatttagttatgccttaaatggttttgtatttgttgtattaggttttatgattcctactgtagtcatagatattttccaaacagagcctgacaacttttcatttttaatagtgatcactatattaatcgctattgcaatttatgcatgtcgatttgtttgggtttatttctggtacaaagatttttatttcccgaaaaatatacaatcttatctagacgaggaacatgattcacatgaaacaccaccttctcgagtgcgttacgcatttattatgaccatgtgtggtattcacggtacaatttcactttcaatggcacttacattaccatttatcattacaaaaggacaagcattcgaataccgtaatgatttattgtttattgcatctttcatggtattaattagtttaatcttagcgcaaattgttttacctttaattacaccatctgccgaagatactacttttaaaggtatgacttatcaatctgccaaaattttcattgttcaaaaagtgatccagcattttaaaaacgaaagtaaaaaagacaaaaacgatacaaattatcgcccagtattaaaccaatactatggagaattgttatttttattaaattcagaacctgataatcaaaatacaaaagaactcaaacgtttagaagatattgcaaaagtaatcgaaacatctacacttgagcgtttaattgataaaggtaaggcaacatatcaggatattaataattaccgcaatattgtcgaattaacagagacacaccgtactgcatcatttgttgaaaaatttgcaaacttcttcaagatgttatggcttagacttaaagcgatgaagcactacaaagccttaaataaagaatctaagaagcaagaatttgaaaattcattcaaagatgttcaaaaaattatgcgtattgtgaatcacaatattattttacgcttaaaagaagaacaaaatagtacaaatgtacttgaggttagcttagtcattaatcattactatgatatgagtcgctcattaaagtggcgtgcacaacgtcgaaaagaacgtcaagaaaacagcaatcaaatcataccgcaagctatgttccataaccacaaattggaagcattgtacttacaacgtcatcttttagatgaattaattcgcaaaaataaaatcaacaatatcgttgcagctcaaattcgagaaaatatcaattacaacgaaattgtcttgtctttacagtccaaacattaagcaagacataacaatacccccgtacatatgagacaaagtcattatcatctcatatgtacggggtttttatattcaacatcaaaaaatcagattgatgaaaagtaaataacctttcatcaatccgatttgattatagaatctattttttaagtttaaatggaattgtacatacgttaacattcttttgataaattaaatacaatttcatacgcaaactagtttgattgtgtaataaattatgccaacgtttcttagtaataaattctggtatcactactgtaatcatatagttttgatcgttggctttacgattaatcttatcgataaaacgtgaaattggtcgtataatactgcgatattccgaatgtaaaataactaatcttacatctgggaaatgacgtttccatttctcttggaatgctttttcatcttcatctccaaatgatacatgtactgctatgacatcattattcgcaagcatttgtgcgtaataaatagacttatcaactgctgttgtaatacttgttatcggcacaattgctaaattacgatctaccacgtccacattaagaacatcaatgtcagaacgtaattgttctgcgatatctcgataatgtttgttaattttcaagaagaaaatcaccacgaacggcaagaaaataagtatcggccatacttggctaaatttagttatgagtaaaatcataaaaacaataaatgtcacgataccaccaagtaagttcacagacaacttacttaaccaattcttaggacgttcatgaatccatttaataaccataccgaattgtgctagtgtaaatggaataaatacaccaaccgcatacaatggaattaaatcttcagtcataccatcaaatacaataattaaaataatggctaatacacctaaaataataatcgagttagagtagcctaagcgatcacctctaacagtaaacattctaggcatatatttatctttagacattgaagccgctaacatcggaaaagctgtaaatccagtgttggctgctaataccaaaatcatcacggtcgttgcctgtacaaaatagaaggcagcattatcaccaaatatttgcatagctaattgtgataaaactgtcgtttccgtttgtggcaaaattccataaacatatgctaaaccaacgataccaactaataaaaacgctaaaattgaacccatagcaattaacgttttcacagcatttttagcacttggctctctaaaattggttaccgcatttgaaatagcttcaacacccgttaacgatgaagcccctgatgaaaatgcttttaatagcaagaataatgttactccaggaaccgcagttcctactgatgcatgcatatgtggttgaatatctcctgtcgccacacggaaagtacctataaatattaatatcactaaccctataatgaaaagatatactggataggataatacggtggcagattcagttaaaccacgtaaatttaatattaaaataaaaagtacaagtaaacatgcaatcagtactttatgcccatataaacttgggaatgcagcaacaaatgcatcagcaccagatgatatactaacagcgacagtcagtatgtaatcgactaataatgagcctcctgcaagcaatccccatttttctcctaaattggtcttggacaccatatacgcgccgccacctttaggatatgcataaataatttgcctataagacataattaaagcagctaataagatcagaacagcacctgcaatcggtaaagtataccaagttgcaactgcacccactactgatagtgtaatcagtatttgttcgggaccgtaagccactgaagataatgcatccgacgaaagaatcgctaaccctttaaacttcgatatcttttcgtcttttagttctctgttttttttaggttgccctataataagtcttttaaattgattgaacataatctcctattcctttttatagtttttgatggatatcactatacgcctatctttccaaaaagtatagagagttaattaatattttttatgtaattatacacctattaacatataaggtgtcaaaaataatggtaaatatacctctttaattaatttattcaatagaactggtataataaaataaatctcattaggcacttaagtaaatttaacatataaaaaggaacgtttatgactactaaaaaactgtattttctatccatttctattatcattttagtcgccatttcaattgctatatatataacattaaatagcaatacgaagacacggttaaccaatgattcgcaacaacaaatagatacaattatcgagcatgatttacaaaagggacacattcctggagcatcaattttaatagtaaaaaatggcaaagtttttttaaataaaggttatggttatcaagatgttgataaaaaagtcaaagcttctcccacaacaaagtatgaaattgcttctaatacgaaagctttcacaggtcttgcaattttaaaattagctcaagaaggtcgattaaacttaaatgatgccgtatccaaacatgtgcctcattttaaaatgaactataatggtcaaaatgaaactattacgattaagcaacttttggctcaaacaagtggtatacctagtgatattacaagcgaagattctgtgacaagcaaaaataatcgtttaaatgatgtaacccgtgcaattatgggtgatgaattacatcataagcccggagaagaatttgaatactcaaatatgaactatgatttattaggtttaattatccaaaacgttacgaagcaatcctatacaaaatatattacaaattcatggctcaagcctttgcatatgacacatacatcattcaaacaaaccaattacaaatcaaaacatgatgctattggctatgaattacaaggttcgacacctgtcgtctctaaacctgaatttaacctttgggatacaccatcagcatatatgatgacatcaactgaagatttggaacattggataaaattccaacttaatccacctgataaatacaaatcattagttcaacaatcacataaaaatttatcttcaacaattggtgaacctaatgccaatgcatatgcttccggctggtttaccaataatgatgaacatttagtgtttcattcaggaacgctagataacttttcatcatttattttactaaatccaaaacaaaattatggaattgttgtacttgcaaatctaaattcggaatatgtacccaaattagttgagcatcttaatacacaaattgtaaatcacaagcgatattcgacggttgcgtctatgctcaatcaatataaagatcaatttaatattgttaccgttttgatgacaacacttattttattagcatttatattctcagcttatcgtgcttggcaaatgcgccatggtcaaattcttttgcgtagatcaaaacggattgctgtattgagttggttatcattatgtatatgtatcgctttagcgctcatattatatgcattaccatatctcattctcggtagcaataattggtcttttgtactgacttggctaccaatagaaattaaattagcactaatcacaacattaattgcattattcagtacattaattgtaattctgttattccttcatacaaagataacgaagacataataaaaaagacttgttcgagccgtgcgtttgataatatatcatccacgattcgaccaagtctttattctttgtatattaaacggataaattattatttaattggattcatgccatctttccaagtttgataaatcagagtaccaccttgcgctttaaacttctcattgcttacgccacgttcaaatggttgcgcaggttgaatatcaatatttggttcaacaccaagttgttctttataccattctgcaaattcagaacctttaacaggtgcatcatctgctacattatagataccattttcaaaatgaatagcttgaatagatgtttcaactgcatcatcaagatgcacaaatgatgttacgccatctgaaagtgtcacttgaccatccataaattgattataaatcatgccatcttttccgtaccaagtacctgggccatataaccagccaaaacgtaaaacaacgtattcatccatacgagccgtttcttcttctaaaccaaccacaccatcaaccgttacttttctatcgccagttgagttaaaatcaagtgaagtttcctcatttgctaatccttcgccaggttcatacataaaggcaatactttgggcaattactttcttaacgtcatgctttttcgccgcatcaattaggtttttagaaccttcaatacgtactttcgtatttgctgccatatcaacattttttaaatccgtaatttgattgataatgatttctggtttaaaatctgctaacgcttgatcaatagtatcagcttttaatatatcaccaatatatgcttttacattaacagcagctagcttttgttgaccattctcagatgtagtaaaaccagcaacctcatgcccctcttcttttagtctttgaactaatttaatgccaataaggcccgttgcaccagttacaaaaattttactcattataaacaccttttctctatttgtctttttaatataattacttgcttgatgagtttacaaaattcacgtgagacttccaaatgatttgcctcaaaatttttcaaagtgtcgtcgtaaaaactgtctagtaaatactaatagtatgtcgtagacctatgacaaatctgaattatgacgaagatcaatcaagaaaaacagcaccaagatcatttcaatttgaaagtaccttactgctgttctttatttattacatttcaatcttaataatgaccgtaatatcacgtgattgtcatttccttgtaatcatacctaaaacaccaattaatcctgtgcgtgtcgctgactttctttagtatgaattaaatcagtaataaagcgattgactggcgcttcaatatgacgttgtttacctaatgttgcaactgcgccattaatataatcaatttcagtttttctattattaacaattaaatcttgatacatggatggataatgcgcaccaactttttcatttaaatcaactaaatattcaaatacttcatcaacatttaaatgaacattatcaatcgtcgctacatgcactatttcttgcgttaatttataaatcaaacacttcgcataactactttcattcagcgatgccatattacactccaacactgtgcttaatgcatttgccgtaccattaacacaaatctttttccaaatcgattggtataaatctttactaatgacaccattcaattccgcttcgttaagtaaatcagcaacttttataacattttctttaccttcatccactagttcacctatttcaactggtccactaccaagtaaatgactgtgtccagggctttcaagacctgccgtccaagtcgtaacacctctgacaatttgtgattgagcaacatactgcgcaatgacttcttcatgcttcagaccattcatcgtacatacgacgatcgtttcattatcaatatgtggcttcatatcttccatcacttcttttaattgcatagactttggaaatagaaagacaacatcgtaaatgctttcgtccggttgatcattaaaatgatacatcggaatgtttaactcgaatgcctctccattaatcgttatatttaatccatgttgcttaaccgcttcaacatgagatgtatatccgtcaataagtgtgacatcatatcctgcttgaaatagtttggcaccaaagccactacctaatgcacccgatccagcaattgcaattttcatcctataaacccctcttcatcgttgttgttcattttaaaaatactactttcgcatattagcgtcaatttgaaaatcattcgcttaatatgcacacagcttttatcgtctataaaagaacacacctaacattaaacgtcaatacgcaacattaagtgtgtatgataaacttactttcacaaaatttcctttaaaatccctacataataacttgctttcatttcagttttacaaattcgtttgatttttaggaactaatagtaaaatgactaaaaatgcaacaattgctagcaaggcattaaacatcatacctgtgaaaccacctaagttcaaatttaaattagctgctaacacagtataaaccgtaccagatactgctactccaaatgcatttcctaatgatgacgccattttatacacacctgaagcaacacccgacttatcatctggcgcactagcaactgctgtatcagttgatggtgtagcatataatcctaaaccagtaccaaacaataaatatccaactatactagatatgatataccacacttctggtaaaaatgttaacgacaataagattaacccaatcactgtaaagccacttcctagtaatagtgggcgcttcggaccatgttgagataaaatcttttcacctacacgaatcattgacaacactgttattaaatacgttaatgaaatataacccgtttgcgaagaattaaatcctaattgttgttgataatacgtgttaataacgataagtgcaccacctgctacaccatttaataagaagtttgaaatagttgcaccactgtatcctctatttttaaaaattgaaaaatcaacaagtggatgctttattttattttcgtaatatacaaaaccaactaatgaacagataaacacaacaattaaacctagaattaacggtgaaactaaaccaaaatgagacgtctgtgtgatgattacatttaaacttaacatcgtcactactaaaatgactaaaccaataacgtcaaactttttagcttctgctttcatacctttgattggttctgctttagtctcaggtgcatgtttgattaagtacattgctaataatgttaatagaattgaaacaacaaatattgaacgccaacctatatatgtagccattaagccaccaaacaacgtacaaataccactaccaccccaagaaccaatagaccaatagcttaaggcacgttgtcttcttgtaccaatataatattcgttaataatagcaagtgttgatggcataatacatgctgcagacaaaccttgaattattctacctataattaaaaatgctggcaaaggtgtaatgatgatgagtaatgaacctacaacatttaatatcaatcctacataagtaattttgacgcgaccaaatttatcagcaacatcaccagcacctacgataaacaaaccagcaaataaggcagataagctaacagcgatatttatcgttccaacgtcactactatatgttgattgtaatgggacaacaagattaacaagtgactgcgcgaatagccaaaaggtaataacccctaaaacgatacccaaaagcaatcggttgtcacctctaaattgttttgatgtgtccatgaattagataagcctcctatgtttaagaaaaacaaatttttaatatgatatattaagaaacaatatcataaatttgcagaaaattataaataaaacatctcattttttagtatttttacaataattaacgctttttatccaaaaactttcatgataataattgctattttagtgtaaacgcatacaaacacaacctataaaaaggctactcaaagattatttgagctccttgagtagcctcattttttataaatcatgaaacgaaatcgctaaattataaacatcttctactattacatattaatactttgcggccgatgattagattgatttttacgatgtcgtgttgttgggtctaatcgtttttctaaaaatcttaatagtacatcaatgacgattgcaatgatagcaatcggaatcgcacctgctaaaataaacgttgtgccatccgtcgcatttgtaccacgaatcacaatgtcaccaagcgtaggtgctcctataaatgatccaacggcaacaacacctatcgcaacaaccaaggcaatacgaatgccaccgataataaccgaaacagataacggtaattcaatcattcgtagcacttgattgcgtgtcattcccatacctttgccagcatccttaatattcgcatcaacactagctataccagtataagtgttttttataattggaagtaacgcatataaaaacactgttaaaactactgtttctgaacctaagcccatgactaacattaaaatagctaacattgcaatgactggaactgtttgaattatatttgcaattgtaattacaaatccagaaagttttgtgtatcttgcaagcaagattcccaatggaataccaattaaagctgcaaacagcacaccatagacagacattaataagtgtttgaaaaataaatcccatagataaccaaagttcgtaacataataattgaataattgctgtaataaattaccttccattacttatgaccacctttctgtttatcaaaatagtggtgttttttcaaaaattcttctgcgacgacagcaggttctttacctttaccatccgcttcataattcaagcgttgcatctctgaagtcgaaatctttcctgtcaacttattaatcgtcgttttaagttctgggtgttgccgtaataattcatttgttgcaacagcactcgcagcataaggtgggaaaaattgtttatcatctttaagtactttcaaatcatacgccgcaattcgaccatctgtagaataacctaatgcaacgtctaacttctctgagtttaatgcgtcgtagactagacctatttgcattggtctcactgtaccaaagtcaaaaccatactcttttttaaatccttcatagccatcgcctttacgattcatccatgaactatccatacctaaacgtaaatctttactatgctttgctaaatctgaaactgtctctaaatgatattttttagcggtttccttcgttaccatgaatgcatacgtattcgcaaaaccatacgaatcaaaaaacgtttgatcaaatttctttttaaatccttgttgtgttgctatcattgctttcttaggatttttaattggtgcttccttcaaagctcccgttaaatctgtgccattatatctaacacctgatatattagcatccccattaattaaggcattatgttgaatcgtacttgaccctaaattatttactaatgttggctttatcttaccgtgtgtatcatgctctattaacaaccgtaacatatgtgaaataatttgcgattcgcttgttgataatgctgtaattttgacatcatttttcgtgctcttactacctagtccgggcaaactacatccagataatacggtaagcgataagacaaacacgacaagtatatatttaattttcttcattatcttagcctcctaattatccagatacttttaagcctttgggaactacccatttttcaactaaagctaataaggcatcaacacctaatgctagtgcagtaacgagtaccgttgcagttacaatcatcagtggatcatataaatttaaaccattgaaaatgaaatcacctaatccacccgcacctacataacttgcaagtgtagcccaactaattacatacacagatgacaaacgaatgccaccaatgataagcggcaatgctaacggcaattcaacatccttcatcaattgaaattgtgtcattcccatactttttccagcttctttaatgttgctatcaatattttgaacaccgagtaccgtgttatttaaaataggtaataatacataaataaatagcgctacaattgcaggcgttttaccaacaccaaaaatcggtatcataatagcaagtacagctagtgttggaatagtttgtaagacacctgccacagttaatacaatattggcagttcgctttgtttttgataataaaatgcctataggtactgcaacaatgatggcaagtaataatgccactatagaaatatagaaatgttccagtgttttcgacatcaactgtccaccatgttcatgtaggaactcaatcatgatttatcatctcctatgtcacgtactttgacattagtagtgtgttgctcatgcacttttgaggacgcagtgtcttcccccacatgttctgtttgcactgtatcctcactatcgccccaaatcgtgtcatatacaatatcaacaacattggcacgcgtaatcagtcctactaaacgctgttgatcatctacgacaggtacattcctaacgtttctttttaaaatcgtacgtacagaatcttgtaatttagaatcaatttgaacggtataaatatgttgttgcatggtgtctcgtaaacttttgtgtccacgtataccctgatttatatcttcaatgtctaagaaacctagtaaatggttattactatctactacaaaaatagcatcaacacgtttttgtctcataatatgaacggcgtcattcagtgttgcttctgcttgtatcgtgattggtttaatcattacaccttctacagtcttgtcattgggacggtcttgaatcagtctattttgtcctataaaatcacgtacaaaatcatttgcgggatgtcttaaaatattgtctggcgtatcaaattgcaccaccttaccttctgacataatacaaattttgtctgctaatttaatcgcttcatccatatcatgtgttacaaagataaacgtcttgcctaattttcgttgtaacgttttaactaaatcttgtaacgtatctctcgtaataggatccaatgcaccaaaaggttcatccattaaaataatatcttgttcggccgcaagtgctcttacaacaccgatacgttgttgttgcccacctgatatttctgctggataacgctctaaaaatgactccggtaaatccacaagtttaattaattcctttgcacgtttatccttttcctctttagtccatttcaacaatttgggtaccaacacaatattctctttaatcgtcatatgaggcattaagccaatttgttgaataacatagccaatatttctacgcaattcgacaggattcatactccgaacatctttaccatcaatttcaatttgtccttctgtcgcttcaatcatacggtttatcattcttaaagcagtcgttttgccacttccactggttccaataaatgcgataaattccccagattgaatatctaaagagatgtcatctactgcctttttattaccagaataaattttcgttaaatgcttaatacttaacataatcatttctccttcctcataaaaaatatgacgaatgatacgcataaaataaaaagaccattatcgcaattgttaaacaaatagagtcataagttaaacaagtacacatcatggtcttgattatgtagaattttatatttttcatctgtaatgtgaatacttaacagtaaacggcgctatgtatgttgaatttctaccgattactttgtttgcacattcgtatattcgacatttaaaactaacatactctatatgatgttattaaacattattattttatctttggcaactaaatagataactcatattttttaaaagcgaatttattatcgctcaattggttgttttatagcaaaaaagtgtcgaaaatgtgaaatattattacaaaagtcgaatttttgtaataatgcacacgcatccattgttacagacggacaaccgcccatccgccactcacaaagtcatccttatattttaatatcttcatcattcattgtagacacccttgccttttgctaacattttctactcccaagcctgtaacggaattccaacgtcaaagtgttgcccatgacagacacacctaaaaaaacaaccaacagcatgagccattggttgtttcgtgtcatcttgtatgttgttgtataaccggtatgctttactcattaattacttatcatgcatccctttaccttctagtatttggttaatatacttttcaacacgcttttgtcttgtttcactgcgtttagcttgtccaatatgatatatatattgatgttgtctgcctggcgttaatttataaaatgaagactctaactgtggcatttcttcgaacttagcttctaactctttaggaataacatattcctctgttttcttcatttcaacttttttaccagctttttcagctttaattgcttcggctagataatatttaatttcttcggtacgtgcttgaatctctgttaaattttcaaatcgtaactgacgagctgcttgcaccttttcagtctgttgaatgagtgtatgatatttatcctccaaaatggcacctttatgaaataatagtgcaacataatttttgaagccatggataagtactacatttttattattcaacgtgtaacaaggatgcatccatttatacgcttcctctaattctgtttcattaaagattaacgctctcaaatatttatattcttcttgccattgactctctttatttaaaaatgcttcaacttgttcatttgattgtttctcactcatagtcatcacttccattttgtttttcaatacacattgtattatatatcctaattttataaaaaactaattttacaaatgcttttgcgttcttacaaaaaatgcatttgactattattataataagcgtataattgtcgcatattattttttgtatttttggcaataacgaaggagtatttatgaataaagacaagcaattgcacaacgacaaaatcaatctatcccaattagtcttattagggttaggctctttaataggatctggttggctatttggtgcgtgggaagcatcatcaatagctggaccagcagcaatcatatcatgggttcttggattcctagtcattggaaccattgcctataactacattgaaatcggcacaatgtttcctcaatcaggtggcatgagtaactatgcccagtatacacatggctcattattaggctttattgctgcttgggcgaattgggtgtctttggtgacaataatacctatcgaagctgtgtcagctgttcaatatatgagttcttggccgtggcattgggcgaaaccaatgagatatttaatggaaaatggctctattagcacatacggattgctagctgtatatctcatcattgttattttttcattattaaactattggtccgtaaaacttttaacatcatttacgagtttaatttctgtatttaaattaggcgtacccatgttaaccatcatcatgttgatgctatcaggattcgacacttcaaattacggccattcggcaagcacatttatgccttacggaagtgcaccgatttttgctgcaacaacagcatcagggattattttttcattcaattcattccagacaattattaatatgggttcagaaattaaaaatcctgaaaaaaatatcgcaagaggcatcgctatctcactgtcaatcagtgcagtgttgtacatcattttacaaagtacgtttatcacttctatgcctcaatcaatgttacaacatagtggatggaatggcatcaacttcaattcaccatttgctgatttagctatcttattaggaattaattggctcgcaattttactatacattgaagcttttgtatcaccattcggtactggcgtgtcatttgtcgccgttacaggtcgagttttacgagcaatggagaaaaatggacatatccctaaatttcttgggaagatgaatgaaaaatatcatatcccacgtgtagcaatcatctttaatgccatcattagtatgattatggttacattatttagagattggggtacgctagcagcagttatttctactgcaactttagtagcctatttaactggcccaacgacagtgattgcattaagaaaaatgggaccaacaatgactcgtccatttagagcaaaaattttaaaagtaatggcaccattatcatttgtattagcttcattagctatatattgggcaatgtggccaacaacggctgaagttattttaatcattatacttggattaccaatctacttcttctatgaatatcgtatgaattggcgtaatacaaagaaacaaattggtggtagcttatggattattgtatatttaatcgtgctatcaatactgtcatttataggaagcaaagaatttaaaggcttaaatatgattcactatccatttgactttatcgttattattattgtggcacttatcttctattacatcggtacaacgagttcatttgaaagcgtctatttccgtcgcgcaacacgaatcaatacgaagatgcgtgagtcactaaataatgaatcaaagtcatctcattaaatattttaaaatacagtgccatatatgatttcaacacacacacattaaccaaccattgatttcaacatcttggttggttttttattttgaaaatcggttataaataactaacataacaagatgatgatcaggctgggacataaatcaatgttctatgctctacgaagttatattggcagtagttgactgaacgaaaatgcgcttgtaacaagcttttttcgattctagtcaggggccccaacacagagaatttcgaaaagaaattctacaggcaatgcaagttggggtgggacgacgataaagaaatactttttctatagaaattagtatttcttatgcatgagttttactcatgtattcatatttttaagtacacattagctgtggctaatgtataagaaccactacataataaatcatttgtggctctttatcatttctgtcccactcccgtagaagtacatcatataatgctgaaaatggtttgagttaaaacagatatcaagctcgtctgattcagtcacaaaattgtcttgttatacttgtcacctatcatctatagaccgtggtatgattaaattggggatgataaaggaggttaataaatatgaagattaatactacaggtggtcaaattcatggtattacacaagatggtttagatatcttcttaggcattccttatgcagaaccaccagttcatgacaatcgctttaaacattctacgttaaaaacacaatggtcagagccaattgatgcaactgaaatacaacccatcccaccgcaaccagacaacaaattagaagattttttctcctcacaatctacaacttttactgaacatgaagactgtttatatctaaatatttggaaacaacataatgatcagacgaagaaacctgtcatcatttatttttatggtggtagttttgaaaatggtcatggtacagccgaactctatcaaccggcacatttagtacaaaataacgacattatcgttattacatgcaattatcgtttaggcgcattaggatatttagactggtcatattttaataaagattttcattccaataatggcctttcagatcaaatcaatgtcataaaatgggtgcatcaatttattgaatccttcggtggcgacgctaataacattactttaatgggtcagtctgcaggcagtatgagcattttgactttacttaaaatacctgacattgagccatacttccataaagtcgttctactaagtggcgcactacgattagacacccttgagagtgcacgcaataaagcacaacatttccaaaaaatgatgctcgattatttagatacagatgatgttacatcattatcgacaaatgatattcttatgctgatggcgaagctaaaacaatctcgaggaccttctaaagggcttgatttaatatatgcgcctattaaaacagattatatacaaaataattatccaacaacgaaaccaatttttgcatgttatacaaaagatgaaggcgatatttatattactagtgaacagaaaaaattatcgccgcaacgctttatcgacattatggaattaaatgatattcctttaaaatacgaagatgttcagacggcgaagcaacaatctttagcgattacacattgttatttcaaacagccgatgaagcaatttttacaacaactcaatatacaagattcaaacgcacaactatggcttgctgaatttgcatggcatgatacttctagcgcacactatcgcagtgcttaccatattctagatatggtattttggttcggaaacttacaaatattagcagcacatcaatatccaacaactgctcaccttaaatttttaagtcgacaaatgcaaaatgatttagctaattttgctaaaagcggtaaaatgccttggccgatgtatcataatgaacgtcgctattatcgcacatatcaataacgttatcgcatctaaaaaagcacacctgaatttgatagcaggcgtgcttttcatatgagaattatgatgatttaaatgttttagcataatgattatttttcaatgtgaaaacaacgattaatcctaatgcgccaatgatggcactcgtatatgtgatagcttgaacagaaacatgtgtcatgaccaagcctccaataatgcctccaacaccaataccagcgtttaaactagacatgttccaactcattacttggcttgtgtcgccttcaacatgttgaatcacaccgctttgcactgctggattagtactccattgcatgatattccaaataaatagtcctgctaacaatagacctgaaccaggtaagattaaattcataagtaacatcatgacgataaaaatagaaacagaaatcattaaccaacgcttacttgtaattttatcggagaatataccacctaatgatgttccaataacgccagcgattccatttactagaagtgctaatgaaacgaatgacatatcatgaccattagataaaataagtggatttataaagacgaatgtcactgagtttgcaatcaatactaaaaacgtaataattaaatattttgctacttcagcaggtcttaatattttcgaagtaacatgattttcatgagatggtgtctcatgattcacagggcctcgttgtatttcctgatccttcggtaaatagatcatcatcaagaagccaacaataatactcacaataattaagaatagaaatgtatagcgccaacctactaaatcgccgataaccgttccaattggtacaccaaaaacattagcaccactaaaccctgtatagacaagtccaatcattttaccacgatttttaggtgctgataacatcgctgtaatagctaatacttttacgataattagtgctgctgctgcagatgagataattctaccaactactaatattgaaaaatttggcgctacagcaataatgccattaccaatgataaatataagtaatgtccataataatacaggccttgatgaaaaacggttcgttaatttaaccagaataggtccacatatcgcaaatgttaaagcgtacattgtcactaattgaccaacgacagcttctgatacatgtaagtcctgactcatcaagttcataattcctgcaaccatcatttcaaccattcctacgataaaaatacttaaaatgaatgtaaatagtcgcatgattgacaatttaaaactcctttcaaacaaaatttccgatattcatttcccttagaataacgatttattaaaaaatgtgtgcaacacaattttatatataaccgttctattatataatattttgctttaattttctgtgcttaattggaaaattattgaaattgtttttcagtatttgaaaaattaacacaagtatgtcatttaataattatgtataattacttcagtttcaacaataactccaaaaaagcacgcacgctttatatgtcagaacagataactgactacaaagtatgcgtgcctttatgaatattttcgctgcgctaatgaatagcgatactatatgtgcgcgtcacttcatttccaattaaaactaatgcctaaatctgatgcagtaaaatctatcatgattcactcttaacatcagtatttcgtgctactaattgatgtcttgcattgaaaaattgaccatagcttaaatatgtcgcaatcaaagcagacataatggtcgcagttgtatgaataaacacgactaacaattgaaatttaatcgcttgtaaaggtggtacgccaccaataattaagcctgtcatcataccaggaatcgacacaagcccatatgttttaaccgaatcaatagttggcactatagctaaacgaatactttcacgtattgcacctttagaagccaatttaggtgtagctgcaagtgataatttagattcaatattagtaccatcttgtacgaatgcacgatctaaattctggtaagctaaattaattgcaatcaagccattatttgcaagcatgccgccgataggtataacttcatttgcggtaaattgaatggcccctgtcgcaatagtacctgcaagcggtaatgccgttccaatgaagatagctagaaatgatatccaaaacacatgatgcatcactggtgatgctcgactaattgtattccatgatgcattaataataatgaccaatacacataaaataagcagccatttatcgtttattttaaaaatataatgcagcaaaaatcccaaaatgattaattgcacaactgctcgtaatgtcgcaacaattaaatctttaataatatgtaaaccttctttatatgaaatgataatcggaatgactaaaagcaatgccgtcaatccaagtgccgtattactcatgttgattcaactcctctgtattagaaatttgaccatcaacaattgttatacgcttttgaaagtgtcgcatactttggtcatcgctgtgggtaatccacataattgccacgccttgatctgctaatttaaaaatgatattttctatcttttctttattattaacgtctaatgcactggtcgattcatctaataaaagaatatccggtgtatacatcagttggcgcgctatagcaattctttgccgctcaccacccgacatattttccacttccgaacttaattgataatgtcccaaaccgacatctttaattaattgctttgcacgttttctatcaaatttatcattacgtgcaagtgatgggaatatcatgttatcttcaatcgtttcaccaaacaagtcactttgctgcatcaaataactgattcgttgacgcaattcttccgggtcataatcattatagggtttacctttaaaataaagttctccactagttggactaaacaaattacatatttgcttttgaaatgtacttttaccactacctgatggacctataatggcaatactctcgcctttatctacttttagactgatatgatctagtatgattctatcgctcgctttatacactaaatctttaatttctaacaacatttgcaccgctcctcatgtaatatatcaggtatattattcccgtttttttggtttttagtgcaattacatttaagaaaaaatcattttcttgtaatatcaaaatttaggcataattgattttcagcatttaaattaaaaacaaaaaatcctattaacatggatactgtctaatgactaagaattaaaattagacaattgtttaacaacctaccatattaaaaggattctttattatttatggatttgattaccacatgatatttttataactttcatcattcaatgaacggacaatttcagtaacaagacggatagaattttcataatcatctacattgagcactgaaacattagaatgcatgtatcgcagcgtaacaccgattgtcatcgttggaataccttcatttgcgacatgaatacttcccgcatctgtacctccacctggtgtcgtatcccattgtacttcgatgttatgttccttagctacatctttaatatgctttcgcaaaccttggtgagcaatacttgtagcatccatcataatgacaactggaccaccgcctagtttactatcgctcgtttgacctgacatacctggggtatcataagcaatacctacatcgacagctatcgccaagtctggtttaatcgtattcgctgccactttcgcaccacgcaaaccaacttcttcttgcactgtggcaccactgtataagttaatgccaatattttcatcttttaaacgttttaatacctcaatagctaatgcacagccatagcgattatcaaatgctttcgcagttaaatatttatcatttgcaagcacttcaaattcactatatggcgtaaccatattgcctacttcaacgccagcttcttcagcttcttccttgctactaacaccaatatctataaacatatttttgatttccattggctttttacgttcttcaggcgttaagacatgtggcggtttagaaccgatgatacctctaatttctttgcccgaatctgttgtaatcgttactttttgagatagcatgacttgattccaccatccaccaactggcgtaaatgaaataaaaccatgtttatcaatctttgttaccataaaaccaacttcatccatatgaccagaaatcataattgagtattgaccattctcagcatttttctttccaaaaatgccacccaagttatcttcaataatttgatcactgacaggctctatatagttacgcattgcttctttaacttgcatttcataaccagcaatgccgtttacatctgttaaatgtttaagtaatttgactgactgattcatgttattcatcctcctgtatttcaacttaaaactattgtatcactaactttcagaaaaacgttccctaccgctttatcattttcaggcttaaatatttttaaaattttgtgaggaatccgcttaaaaacctcatatttctaaaatttaatattccgaaaaagtcacaatttaaaattccttattataatacgttattcttttattgttactaatttcaatctgtttagtcttgcgctattataaaattaaaaagtgtagagataacaacgcattaacgtcgctattttccctacacttaaatactagtttctttaattaacttatcattaaagttattcagatattgaatattcattaatcataatgtgaccatgccgatagtattaatacttctttatttcgatcatctacggtatagacgaccctgtgctgatggttaattcttcttgaatatcgctctaaatatttaggctctaatttttcaaaagattgtgttattttatacggatcattttttaaagtctcaacaatttctaaaaatgacttctttaaataagaatgttttattttctttaaatctgatttcgctgaatttttaatcttaaccgtgtaattgctcattaaagattatcccaatcaatatcatctatatttgttgtaccactattatctttttctctttctcttactttgtccattgtaccagtagattcaagatatattgtctcttgtatacttttccaatcttctaaacctataatcacagcattattttcggcattattgccactaatataaattggttcgtgattattattaacattttttagtaattgataaaaatcttttctcgcttctgtagggctagtgataatcatataaaccctcctttgttttctgttacgctaattatagcgtacgcacttgagtacgtcaatattaccaacgagttcatcgtattcttaatacctatatgctatcgttcacaaacttttgttcttttcttccaacataccgcctataatgctcaaaaagaaatcagcagtggaacacactacgttccctaccgctttatcattttcaggcttaaatatttttaaaattttgtgaggaatccgcttaaaaaaactcatatcttcaaaaaaaatgacaaaatttaaatttttgaataacatcattttttagtaaatgttataatttctttataatacaaatatcgaaagaaggcgactgactttgaaaaaattatgttcattaattgtagtagcattagtttgtatcattgcattatcagcttgtggtaaagaacaaaccaaaacatatgaaggtgatgttagtggtaaacatgtactaacttctatcacatataaagatgataaagttttaaaacagtctacaatcaacacaattaaatatgacgatctaggtatggataaagacgaagccaaaaagttattcgccaaatctgaaagtattttcaaagaccttaaaggcgtaaaatacaaagtagactataaagataaaaaagcaattgaacacttagacatagattacacagaagttgacatgaaaaaattaaataaacgtcttggtgtttcgactaaagaaaataaagatattagttttgaaaaacttgaaaagcaattaaagcacagaggtttaaaagaaaaagataaaatggacgacaaatagtttataacttaaaaatgccctcagataagactaaggttacaaaccttaattcatattctgagggctttaatatttgaagttcttgtgtgaccagcatccactactaatataaaattatttgcagtaacgctaaaatccgctgctttcaatttcccgaaataattaagttaactaatgagttttaatttataatcatgtatcgtttgtaactcaccatcgacttttcgatatacaatatgatcagcagtaatttctgtaggactggatacgccaacagctgctgcaatattgaataagccttcatgcaaacttgttacatagtttgtgacacgatattgcttttctccaacaatcaatgctttttctttcttcgcatctgtcgttgcaacacctacaggacacgtattcatgtgacattgttgactcattatacaaccgacactaatcatcatcccacgtgcgatatttacaaaatctgcacctaaacctagtgcaatcgcaattttatctggtgtcactaacttaccagatgccgccaatttcactttatctcgaataccatatttttctaacatgccagacacaataggtagagctgtaaatagcggtaagccaacaccatcttgtaattcttggaatgttgcaccagtaccaccttcaccaccatcaatcgtaataaagcttggatacttatctagttccaccatcgtacgtacaagtgtttcaatttctgaaactttgcttactacaattttgaatcctactggtttttgacctaattgctgcaactgatcgacgaaacgaatcaaatcttcagcattatgaataaattcgtaacggttaggtgaattgattgttttataaggttcaacatttcggattttagcaatttcttcgtttaccttttcagcttccatatgaccaccacgagtcttagcaccttgtgccaacttcagctcaaatgcgcgtacgttagataactgtgcaacctctttaaataaaccttcactaaaattaccttctttatcacgaacaccaaataaaccgggaccaatttggaaaatgatatccccattaccttttaaatgatattctgataagccaccttcacctgtattcatccaagtgcccgctttagctagacctttagataaagctgtaatggcattttttcctaaagcgccataactcataccagattgtcctacgatacgttttaaaataaatggatgttttaaatgttcacctaattttattgcatggtcatcacttaagtaatacggatcaatctttgtcggcacacgatattcttcacgactaaataaacgctcattcgcgattttataaatgaatgttgataacaatgttgtattatctactgaaatctcattacgttgcatcggaaacattgtgttctgtatgtaaaagccgtcttgataatctttagtagtaccgaagctggtcatacgagagttatattttccagccaaaacgatatttttataatcattacgtgaaaaaggtttcccttcattatccccagaaaataaatactgacgtaattccggtcccattttttctgaaatatatctaatacgtgctagtaaaggataattccttaatacactatgttgtgattgtcttttatctttaattaaccaaataagcccgataacaataaccgtaagcatgaatcctacaacgataatgttaactataaattgcatgactgtaagaaacgtcattacaatacctccccccaaaatttcaattcaatatttatgatacaccttacaaaacaaaacacaatggaagcgcttcattttataaaacaattttatgatatgtttttcattttaaattttaatgtataaaacatacaatacaaagtaatatgtgctaaagtatctatataatacaactatttaagaggtatactatgtcaaatacaaataaacattacatagaagaagaatacgctaccgaacaatcgcgttttttcaaacgtgatattggatttattttcctttacatatttttggttaacatcttgccgatcattatcgtctttttaacttttgggttagtagctgtattcactcaacaagctccgtggggtttctcttttcctatttcaatgaacattagctatttactcgcagttattatttcactagctatttttcgtctgatgcatgaagatgcgtttattccaatgatacgttcgcaaatcgttgctagtgctaaatataaatggcatattcttatatcatttacactaagtgtcgtactctttttacttttaaatcatttcaatattttcgcactaaatgtagattcctttactgtctttgacatttacccgctcattaaagggtatggttccatcagtttaataactatattttcgttaaccattatattaaatactttgatttgtcaacttattttccgtcatattttaattcaagaattaagcagattaatacctttaaagattacaatagtattgtccattatccttgaaactctgttctactatccatacattaatacatggtgggaattcattccagcattgatactagcaggtagtgcgacttacttatatttaaaatcataccgtaattttatggtgagctatttctatcaattagcagttatactcgttttgcatattttcatgtaaaatttttcagagtattatccattatccatacacatcaaaaagcacacttaaaagtcagtatcaaaactcacttttaagcgtgatttatttagatatactgtcgttctaaaaacgagccatatagaatgtttcatgtcctagcatgaagcacatgaatcgccatgctcaatataccttttaaaatttaaatattcattaacttaatatgctttaattcacttcattaaagactactcgctggacgtggtgttggctttttcaagaaactcataatcattattacaatgactaacataccacaaattagatacatccatttaaatcctactaaatcggaaataggtcccatcaatgcgccacctaacgatatacctaagtctgcacaggcaataaataaacctaacaacatattacgacctacttttggtaagacgaagcttaagtatgatgttaatgttgggtacaccattgcttgcgtcattcctattaatatcgcactaccatagaaaataattgcacctacttgcggaccaaatgccactacaaatgacgcgattactaataatgatagtacagataccatatatttaggatgccacataccatctgacggaatgtatttccttaagtaaaatcttgccgcaacaactgcgatggcctgtattgtcaaaaagattcccgcattcgcgaatcctaaactcactgtgtataacggtacaaatgtactaactgcaccaaatacaatcgatgcaacaatcatgataataccactgttcaacaactctttatttttgaaaaattgcgcaaaaacagttacagcgttaaacggcattttttcaatcttatctgacgtatcgggttcctgttcagcaaaggtcacgcgatagccaaagaatgttgttgttaatgcgataaagataatgacaattgcaaatagtgaaatattatttgcattccaaatacctacggcaactaatggtccgattaagtttggaatcgttgaaaatagcgagtacaatgatacaccttcagaacgatgttcctctggtaatgcatcaataatacctagctgtaaagacatagaaaagaatgccgtacacacaccttgcataacacgtgctacgaaataaccttctaagccagtaaaaccataaataattaaagctatggcattgataatcaaaataattcttaatactttaatgggaccgacacgagcaataatttgtcctgcccatggtcgaaataccattgctgttaacatgtatgcccccataacgataccgataaccgtattcgttgcgcctaaatcatgccctcgtaaaggtataaacacgtttaagattgcattggcactaaagaacatcaatgttaatatatataatctcaaaaagggccaagccattgcacctttcattatctcactccttagaatgatagttgtttttctattaattctcttgtataagcattgtcacttttatgcaatgcgcttgtcggaatttgttcttctatttttccgtttttaaaaataattaattgatcacataaatacgtggcagcttgaatatcatgtgtgataaaaatataactcaactgacgcgtttcacgtaaatgaatcaataaatctaatatttgtgtttgaattgacatgtcgagtgaactaatggcttcatcaaacaaaatatatttagggttaatacatattgcacgcgcaatcgcaacacgttgcgcctctccacctgataacatattaggatatttatccatgtatgccttagatagaccgacttcttccaacaatgtaattgcttggacttccataacttctttaggttgtccatcacattgacacatcacttcaaataagatttctctaacagtctgaaatggatgtaatgatgacgtataatcttgaaatacagcaccaatttgatgacgtctcactttcttcttatgcatcggttgatcatttaaggttacacaacctttatccggtttctcaatacctaatatcatacgactcaacgtcgatttaccgctaccactttctccgataatcgcaatcgtcgcaccgattggacactcaaatgacacacctttcacgataggtgttcgacgacgcttaaaaacatgtgcgctttgatatgacttttcaacatctttaattttaatcatgtacatcacccctcatcacatgtttaaaatgatcattaatcttcttcttcgttgataataaatacttcgtataaacatgttctggatgatgcaagactgattcacgtgtcccttgttcaataagctgaccatttttcatcacaacaacacggtctgcaatcttgttaataaccgttaaatcatgtgaaatgaaaatcatcgcacagtcaaagtgttttttaatatctataaatgcttccagtacatcatattgtgtaattgtatctaaagccgttgtcggctcatcagcaatgattaactttggtttcaaagctaacgctaaagcaatcatcaatcgctgtaacattcctcctgataacatgtaagggtatgattttaatatacgtttaggatctttcaaacttaaataatccatatattcaatcaatgtcttttcaatttcttgtgtagacattgacgtatgtactttcatagtctcaaacatttgtttaccgacagtagttgatgggtcaaaggcacgactaccttgttgcatgaccatcgcaatgtctttaccacggtactttttcaattgcgattcagataatgacaacattgatgtaccatcaaagataatttcacctgtcaccccgagtcgttcgggattcaaaccaataatcgatttacaagtgattgatttaccactaccactttctccaataacgcctaaagtttcacccttagttaatgtaaaattcacatcactcacgagtggttgatctgtccaggtatctgtaatcgtcaaatgtttaactgttaacaatgtcatgattgcaccactccttttttcacagaacgaagtttatctttagaagagatgcggggatcaatagcaatttgtaaagcatcggataagaagttaaatgccatcactataatcactatggcaatacctggcgcaaacatcatttcaggatgtgtaaacatcacttttctagcttcgttaagcatcatgccccactctgcagtaggcgctttgacacctaatcctaaaaatgaaaagccagatatttgcaagatcattgaacacatcgagctactagagatgatagcaatatctgctaatgttaatggcataatatgtttgtgaataattttcatatcattcataccgattgttttagcaaatcttacatggtcagaagcagtgtactgcataacacttgtacgtataacacgacagaaccatgcccaacgcgtcaaaataaatgccatgataatattttcggcacccattccaaacaatgcaattaatgctaacgttacaacataacttgggaatgccaacataacatcacacgcacgcatgattaaggcgtcaacaaacccttggaaatatcctgataagaatcctaaaatagatccaataagtacagaaacaaatagcgcaacaaagacatataacaaacttggtctaatcgcataaattaacctagttaaaatatctctacctaaatggtcagtacctagtagatgttgaaaactcatgccagcaaatttgtttgctgtatcgatatggttaggatcataaaatgtcacaagtggtgctgctaatcctaaaaagacatataatacaataatgcctaaagcaattactgcacctttatcttgtaataatcgttttaaaattatcatcgtgcgccctcccttaatcttggatttaatagcgcattaatgatatctgctaatgtattaaatacaataaataataccgctacaattaatacatatgcttgaatgactggaaaatcgtgttcaagtattgcttttaaacttaattgacctagtccaggccatgcaaagatatactcgataacaactagtccacccattatcattggtatagacatacaaaagattgataccgcaacttgtaaagcattacgcaacacatgcaacattaatgtgatagatttcacaccgcttgctcttaaataaagtacataatcttcatttaattgttccaccatcgagcgtctaacatttctaaagtaaataccagcataggcaatcgtaataacgatcactggcaatatgtaactttctggacctgttaatccagaagtcggcaatatgtttaacttcactgaaacgtaaataataagtattgaagctatccaatatgatggtaatgcagttagaaagaaagccactgaacgtatcgcacgatcagtgaactttcctctttttaatgcactaactacacctaaaataattgatgtaatcatcaccataacacttgaaattattgttaatttcaatgtattcataaatgctggaccaatacgttcagcaactgggtcacctgtaatgtagcttgtaccaaaattaaattgcatcgcttcaagtaaccaatttttatattgaattaataatggatcattgaaaccgtacttctcattcgtttctgcaatcaactctggtgttacatttggcgtcccttgtgcatgtaaaattgtcacagctggattttcatttgtaatatacgtcaatagaaatgtcataaaacttactacaatcatcaatggaaacatgagcgcaatacgttttaagataaatttgaacatctaattgctcctttatttatactgcatttcattgaatggtaattcatactgtgattgtgtgaatgatactttttctaaatcttttggtgcaacaactgtcatactaccgtgtgaaatagggataaagataccttcatcatcaatttgtttcaaaatgtttttataagcgtctgaacgctctttaccgttttggattttaaatgcgtcatcaatgctgttgtatattttatctttgttctcaatgcctgatgttgcactttcataaccatttttcgctttaaatgctgcaatagtactttgtggatcgtacaataatccccaagtttggttgaacattaagtcataatcaccagaagtacgacgttcagcaattttatctgatgtttcgccattgatgtttaacttaatacccattttcttaaattctgcttgtaagtattctgcttgttctttttgacttgaagaacctttgtcatagtacattgccatttcaaggtttttaccatctttttgacgaacatcgctgtctttacctttcttccaaccagcttcatctaataatgattctgcttttttaaggtcatacttacgtgttggcatatcgaaattaatgtctgttacatttttcgcaaataattgagttgctggtttttcttgaccatctaaaatttctttggcaattttatctctgtttaccatatgaccaatcgcttgtctgactgttttgtcactcacagcgttatcttttttaccagaattgacaactaacattttcgtattcataggttgactacgcttaacttgatagtcacctgtatctttcaattgttttaaagagtctttgtctaagctatctgtacctctatcatctgtgaaggcaaagttcgtttcaccttttttcattgataggaatgctgtttcaccagcaggcattacttttgcttgtactttgttaagtttagacttttcgccccagtattgatcatttttgttaaagtctgcagactcatcttttttgtgttcacctaatttaaatggaccagtaccatcgaactttttaacgccatcttttgttgtaccgtttttaaagtcttttggagacacaaatacatatggacgaggcatcgctaattcagccaatgcaggttgatatgcttctttcaaattcaattcaaccgtgtacttatctttaactttaacattgtcaattaatgtcgaaatctttaaccaagaatgcaattttttgttttcttgaactgcgtcaatatttttcttaactgcgtcagcatcaaatggcgtaccatcatggaatttaacgtcatctctcaaatggaacgtgtatgtcttcccatcttcagacacatcccactttttagctagtaaaggcttaataccatctttcgtgttacgtacaagcggctcgtatatcatactttcagcagacattgatccaccgtaaacatgcggattcatatcaccgatatctttaaccgtcgtatacgttaattgcttgttttcttttttctcctctaaacctttattaccgccacaaccagttaaaattagccctgatgcaagtaacattgcactcattttagttagttttctcatttgcttttcctctttctaaattgataagttgcattacttaatcaaatcgtaatgattatttttctcaattatttgcttatttttatgtaaatgtcaaacataattcaataatttttttctattataaaacttcaaacccttattatgaaagcgttctattgatttccaaaaattttgtgacgagtgctttatctccttcaaatagatttgtattaaattgagaagataagtgttgatcttgatgcatatccttgtacgcctggcaacttgcttcatagcgagttaggaactgatcaatcattggcgttttgatacctagcattttcccaatatgctgaatcatcgccgttctgtaataatcttcacttggcattcttggaatttgaacaacatcctgttcatttttatagacttgcttaaatggtacagctgaaaaatcaaagtaatgtccgttttcgtctggctgtgaaaatggatcaatgaggattgcggtatatcttacataaagcagatattcttgtaagatatctggcaagatttcgaaatgctcaatatcaccttcatccaaagtttcaggacgtactggataattttccttcaccataaattgaagcaggttgactgacggcactctaaatgcttgtaaaataaccatcatttccttccacattaaacgcatttcacggattagtgtcatcgttatcggtccttcaggaaataacttatacacataaaccggtacatctgttccttcgaaaatggctttcaatgaaaagtcattcataaatagtggtgggtgcacataaagcgaactgtttcgcgtttcagcatgcagtggcgattcaacgacttctaattgaatcttcaattgctcagctaaagcagagattcgttgacacattgttgagtttgaatgtgtcgatcccatgtacaatttcttttttacacctgttgtcaacacatgattaggcgcttctttatcaacaatacgtgtatcgccaagataagttgagaatgaaatcacttcgatatctttattaaatttagacataaattgttcgacaatcatttgcgaaccaaatgtcggtgatattaaaatgacatgtttgacactttgcaaagtttctaacgacaattgctgtagtgtgtcataataagcatctgctgtgcatgccatgacaaccgtttcgtattcacccttaacgtttttaacatctttatacaaacgattaatttcaaacttaccttccagatgttgatgcgcctcgttttgtattttgacttcaaattgtttcgcttttttatacgcttgatataagcgttttgatttttctgatgttgaggcacgtccaaccatatcaatctcataatctgattttaaatagcaaatattcgctaattggattgcgaccggaccagtgcctatcattaataatttagacatccgtaatacctacctttatagctgcttttttataaagtgctatatcaaaaatttgctgtggtctcatatgtttattcacacattgccacttatcttccgctgtttcttgtgacggataattaaatattgctttgatgccatcaccaaagcgcattgcaactacgacattttcatttgttaaatcatataattcttctaaaatgctgtactttaaaggaattgtcgagctgaatatgatatgcgtcacatctttgatatctttaagttcagataccttttgatccgtaattgttatatcttcatttggtgctaagacgttaacgattctgcgccctaggtcaacggcttgtggatcaatatcaataccgataactgaagcacctgtttcttttgctacttgaattaacgtcattggatatgcacctgaaccaactaacaataatttgtcattgctagctatactacattgtccaaactcttcatcaatacaatgttctatattgtcaaagtaacctgtggtagacgcctgtccgtctaatagacgtctcgctctaatgacttccacttgtttaacacactgcgctgtaatatattgcagtgattttattaattgtgctttttcttcaacgtcacgccaagcattaaattgttgttcataaataggatttaaaataaattcactatagtcatccatcaatgtttctaatgcttcgatatattgatcgtcttgtaatacacgctcgtaatgcgcttcaaacttttctaaatattgttgtaatatcaatttgatttcattattaaagttattcattgtaggctccttattctatatatgcttttcctgtagctacagttgtaacctgtcctttaattgaagtttgatatcccaattgatgacatcgctttgatgtcactaaaatactgccccctggctgatgtactgtaaaatctttgcatgcgtcattacgttgataattattaaaaaccccaattgatgctgtaccagaaccacagctattttcccaaattaaactttgaatttctggtatatagattaatggctgtaaaaattgacgttgttcatcaaaaagcatcatacctactgttttatatttgtgactccattgttgctcacgcacaaacgcttcaaccaaatgttgaatttctgttgttacttgtttaactggaatcacataatgtacatatgtttcataaataatttctattgctttccatgaatgattacccatattaattgttgttggcacaacacgatgggcttgtggcatttgaacttcatagtattggcaatcatgaattgcgcattgcactaaatccgaacagccagacaccttcaccttaaactgttggtctttaagcaaatgactttcctgcaaatgatgtatatatgacatcgtcgcattaccgcaaaattcattaccgctcataactaagtgaaaatcattaccatcatcattttgtgttgattctataaagcctacctgttcacagcatacatgtgttgcggccatcaactgattggcgatagatgcatattcactagcatcatgttttgaatgaacaagtatcgtcatattccccgaaggattatacttagaaaattctataacctgccgattcatacgacactcctttagatgtatttttagagcctctgtaattttaattactagaggctcttatgcagttgttgcgaagcaaacaactgtattcctctaaacctgtaattttttagaagatgaacctaatagctctatctagtaggtaagtcatgctaattcgcaaaagcgaaaaccatggctcttatgcagttgttgcgaagcaagcaactgtattcctctaaaactgtaattttttagaagctgaacctaatagctctatctattaggtaagtcatgctaacccgcaaagtggaaagcatgacttagtaatcggttgttgtatcaaaatgcaaccgtaaaccttatttaaagttgcttcttgtggctctacaagcgaatgcagttgtccgttaactacattcacttagatgcttttactgttttcacctcaactaaaacttcaaaaaagttgcagaaaacaaatcgtaactattacgatttgattatatactatattagttgagaatcattgtcaataaaggttgtaaatgaatgcacatttatattttgataatccttccataaacttcgtattctcagcacattcaagtctttttgaaaatttttatcaataattgagtagaagttccgttctagtcagttcaaaattttacgtaagttgtctctgcgtattgctttagtgagaataacccacacttgtggaaacgtccttttgttaatctacaatggatacccttgtctttcgctaacatttcctattaccaatcctgtaacggattttcatcgtcaagttgttgcccatacaatacgcaccaaaaaagctttgtacaatttcgtacaaagctttaaaaatttaaataaaaatatcattgttttaatgaactagccatatcagattttatttcgtttgctaatacttgtaattcagggaagtaattattagcaaagccaattattattttattttttacaaacgtgttaatctctcgatcttctggaatcgtattttctattaaattcaaaagctcactatgacttatgttctctatacttactgtatttaaatattttaaaatcacaagatacaattcatcaaatacttcatgttcaaaatcaaagtccaataataataaactaacggaattagtttctaactgattatctccaattttatctgcaatctctcttatagcttgatatagcaatctaaaactttctttttcttttaacataaaattctccttaatttattagaatagataaaatacagcttattttaaagatactccaaaagtttgaactcgagattctgataaattagatgcacgacctacaatacgttaaaacaagctttaagcaatacacttcaaatgaacaatatgtgattttcaaagattaattaatctccgctttaaatgtctttcattgcgacaatatgcatacattgcctacttcatgccaaattcttttccactggatatcgattttaaataattattccaatgtccgcttccacgaatcatcacttaacatctcgccaggccatgtgtaagccatcacaccaccatcaattcgaatcgtctctccagttatgaatgaactgtcgtcagatgctaagaagactactaatttagcaacttcttctggtttacctaaacgtcccagcggagtcatccatttttgattttctctaaatgttttacctgcatcatcctcactcgtacctgtcagtttatctactaacggggtttcaattgtacctggtgcaatcgcattggctcgaatgctatcacggccatactcaattgcgattgattttgtaaaattaatcactgcacctttcgcagcattatatccagagcgatacaagtctgctgcttgtccggaaaatgaagacgtattaacaatagagccaccttgattcatcattaaaggtaacatcattttcgtcattaaaaatgtcccacgcatatctacattcataatcttgtcatacacatctattggatactcatgaattctatcagccgcattatccacaccggcattattaaacaacacatcgattcttccaaactgttcctttatgtcagacacaaagtctaccacttgttgttcgcttgcattatccacattatacgccttcgcattgtcaccattacttttaattttatcgacagtctccgataccgcttcagctatgtctaccgccaatacatacgcaccttattgagctaaagcgattgcagaagcttgaccgatacctgtacttgctcctgttacgactgctactttattttccaaacgtttcattcagtcactcctatacaacatatcttaaacttacagtccttattttccactgttcgatgcttcataaacctaatagataagtcttcaggcagtcttaactactctgctatacactttctattgaataactcaaaatatttaacaatattagtttttttattttctgaaaattgttacttttgagagtattttttgttacactttaaatatttaacaaaggggggaataattgatgacatcaaaacatcaacaaaaggggtctatcgtcaatcgtttcttgaatagtgttgaaaaaatcggaaataaattgccagatcctagcgtcttattctttttaatgtgtgtgggcttagccattatgacatgggttatctcattatttaatgtatctgttaagcatccaggtacgcatcaaaccatttatattaaaaatataattagccatgatggatttacgatgataatgaatgatacgattaaaaatttctcagagttcccagcattaggcttagtactagcagtgatgattggtattggtgttgcagagaaaacaggatacttcgataagttaatgatttctgttgtgaatcgcgcaccacgcttcttaattttaccgactattatattaattggtattttaggtagtacagccggcgatgctgcgacaattatcttgccgccgcttgcagcaatgctttttattaaaattggctatcaccctatcgctggactaacgatggcatatgcttccgctgttggaggatttgcagcaaatatagttgttggtatgcaagatgctttggtctattcatttacagaaccggcaacacgtatcgtttcagattctattaaaacaaacgttgctatgaactggtactttatcgcagcgagtgtcgttgtattacttcctacgatattgctagttacaactaagctcattattcctagattaggaaaatatgatgacagtttaatgcatgatgaccatgaagaaacatcttcacatattactgacaaagaagcacatgctttaaaatgggcaaatatcagtttcatagtcacaattattttattaattattacagccattcctgaacatagctttttaagaaatgctaaaacaggcagcttactagacgatgcgccattaattaacggtgtcggattaattattcttgtcgtatttttagtacctggattagtttatgggattttaagcaaagaaattaaaaatacaaaagacttaggtaaaatgttcggcgatgctgtaggatcaatgggaacatttatcgttattgtgttttttgcagcacagctacttgcgtatttaaagtggagtaatttaggaattatcgctgctgttaaaggtgccaaattattagaacatcaaaacggtattgtattgatactaggtattattgtactgagtgcaatggtcaacatgttaatcggaagcgcatcggctaaatggggtattttaggaccgatattcgtaccaatgttaatccttatcggctttcatcccgcattcacacaagtcatttaccgtgtaggcgattcaattaccaatccaattacaccgatgatgccgtacttacctttattattaacttatgcacaaaaatacgataaacgcatgaaactcggagccttactttctagtttaatgccgtattcaatcgcgctaagtattgtatggacagtatttgtcatcatttggttcctattaggtatccctgttggaccaggtggaccgatattcgttaaataacagtattcaaagggataaattaaaatgccactatacaagatttgacctgtatagtggcatgatttgttatgatatagcgttcgagatgaaactctgcatttatatgaacaattatagtctatcactaataatatttaatctgttccaaccgttaatttggtttacaacaaagacaagatcaataatttgttcttcatcataaaatgattttagccggtcaataatttcaaacttcttaaagtctttgattgaatttaacatttctgcaaattcaagcgtcactttttcttgatcagtaaataaatctaaatgtctaaaactcaagacttcatcaattttcatttgtgttacacccaattcctttaattcttttttatggatatcaacacaataatgacaaccgttaattttagaaattaataacttaatcaatgcactaagttcatcattaacgggtgattgatgaataaacttttcaccttggctcattacagacattaactctccattttgtttcttgtaattatacggcatttgcaatctctcctttacattgtttaataccaatccagtgatactacacttcgaacaatattggatagaatttgaaattctgtataacatcttgtcaatctatgctttagttaaaacatttagcacttatatttaaaaaatatataaaatatgaaaacagattgaaaggatattataccttgctctacccttttttataaaaaatcacacacatttgagaaaatttgataatgtcaataaatcacgtcatcgacattgttattcgatatatattgttcttataatggccaaactattattccatttaaattaacgtggttcgtttgtgttaatgtactgtacaaaactggggaagtattggtgatgatgaagtgatttatattaattgcgaaacaccttcgatagcaatgacatagattattggaagattaaatcaaaaataaagaagaccctagtggccttcttttttatctaattcttctttgattttttctggtgattttctttcatgtgctggttttaataatttatctactccttcactttttatcatagcgccaccaaattgataattatgttcaggcgatgcataagcagtaaaatcatcttctttattttcattgatgtatccttcaatcacagcacttcccataggacttgtttccaagtttgtgaaatgtacagatttaatcgtgttcgtttctttagtattatgcttaagatagagtgtaatacgttcttgttgttctttgtagtaaatcgctttttgtttttctttttcatcatatttcattttaaaatgcatgaccgtagaaactgtacatatacacaatatgacaccaataattataaaaacatgttttttggacattaaagtaactcctaactttagtgactcttctttttatttagttctttttttatatcatctggtgattttaactgattggctggctttagtaactcgcttaatttttcactttctatcatagcaccaccaaattgataattatgttctggtgtagcataagcagtaaaattatcttttttgttttcatttatgtaaccttcaatcacagcacttcccataggacttgtttccgagtttgtgaaatgtacagatttgattgtattcggttctttagtgttatgcttgagataaagtgtaatgcgcgcttgttgttctttatagtatattgctttttgtttttctttttcgtcatatttcacttttaaatagatacctgcaacactaattaatatgattaacataatactagttaatattaaaattttctttttcgacatctatcaccagctcctaaaatgtggtggaattttatacagtttacatatttatgatactacaaaacacactcttacaaagaaaatctataattttaatctaggtcaaggaaaagcagccaaaagtgtttatataagatcaacgaaatattgcgggtataaagtggttaacagataaatacagtggaaattgtactaaaaattcaacttttcatttttatatgtaagtatgattaacttgaaaacaaaattaaaacggccgcatagttttagcggtcgttctttttagactctaattccttttttatctcatcaggtgatttggtttgatgtactggttttaataacgtgcttaaatttttacttttgattaaacttccaccaaattgataattatgttctggagacccatatgcaacaaaatcatcttctttattttcatttatgtaaccttcaattactgcatcgcccataggtcctctttttaaacttgtgaaatgtacagttttgatggtattgggttctttagtattatgcttaagatagagtgtaatacgctcctgttgttctttatagtatattgctttttgtttttctttttcgtcatatttcacttttaaataaatgactgatgcaactatacatatacataaaatgacaccaataattataaaaacatgttttttgttcattaaagtaactcctaaaatgtggtggaaaatgaaaaaatttttataatctataattatgaacattacagattataaaccataacactaacatcgtcgccttcattaacttgattgttaaaatcagcaattactgagaattgtacaaggaataattgcctattatgccctcatgtaattattgccttactaacattaacaaaatcgatagctattacattaaatgcctataccccagacctcaaacacctttttatacaggacgcactgtaatttcattcacgttaacgtgctttggttgtgttaatgcatataatactgcttctgcaatatcttgtggttcaagttttttacgatctgttggattgtatgcggcagttatggctgtatctaccattcctggagaaatgcttgttactttaacgcctgtctttgccaactctttttctaatccttgagtaatagtgtgaactgctgctttcgtcgcactataaatcgtactacttttcgttacttcaaagccagaaatagatgcaatgttaataagatggccacttgattgttctaacatagttggtaatgcagcctgtgccgtatataaagtgcctttgatattcacatcaatcatactatcccactcatctacttgataatcagtaatcttagacgacaacatttgccccgcactattgataacaatatccaaaccaccgaatgtttgttgtgcaatttttatcaattcatcgacttcttctttattcgttacatctgttggcactaccttcacactatcttgtgacaattgattcgctacgttttgtaatttttctttatttctacctgctaagacaacttttgccccttcttcatgtagtaatgttgcaattgcttctccaataccactacctgcacctgtaactactgctactttatctgttaatactgtcataatgatcgactcctttgattctttttattttttcagggtaaatcataaatacatattacttttaaaaagcgtatcacaattcatataacggtcataataactcgcttcattttcatagataaattacattacaagccattcgaaacatacaattaatcgttgcttatattttttatttttaaaaatgttgaaaaatcgtcacttctttattgtaaaaacattatattagtaataaagttaatactgtgatttatcattcgattgaatgattagagggaggaataaaacgtgacatatcatgagcgtgttttagcattaagagcagaaagtaaaagaaccgcatttgattttcgattcgaagatttatttagcaaagaagaatggctaagtatgtctcttgcagaaagacaaaaagctgaaaaagcatttcgacacgaagttaaaaatatggacgatgtaagaatgcccttctcaagtgtccatgacgcccaagtaaaattatataatgttgtatattcttataacggcattaaacgtaattttaaacaagttgaaaatgaaggattctaatatcatttcgtttatatatagcagacatgatagaattttatatgtaaatcttgtaggtaatcgttttaaaaataatataagtatgactaaagccacatccaatataggacgtggcttttagtatcgttccagatttgtggggagttagggtttacttaattaaaggggtctgccctcaattgctcaccaacgagggcaagttacatcaatcacacttcaattgccgccgactaggggtagtaatcattggcaataagaactagttagtgactaacgatttacgttccatagcaaagtgatacaaacgctcagcatcaatgtaaggcatagaatcaatagttaggtaaccatctttgatgtcaccaattaatccttgatttacaccagtgttcacgtaaatatcatagctacttacgtctgagaaaataagcgcttcaatctcttttctcataatcatcactccaatgtttatatagtatttatataaactctctcgtctctctctatttattaacttcttacaagtctaatattacatgaatttccaaataaataaagggatttgtgatgtatttcacaaatttatcactattttggaaaattaagaaatatttaattatataaaagtttaataagtcagaaaatatgataaaatgtagatgttctttagacattaaaagcttctaacatgatacggaatatgaggttcctgtatcacattagaagcttttttgttgcggtgcttatattaataatggcatgaatgaacgcatgctgtcttagctccaagaatcatataagctattaaacttccgttctttgaatattttttaatttcttactaatatcatccagttcattcttcgcctttttaacccaatctccttgagctacattatcaaattcacctttaaattttttgaaatggctacctatatttcacagctcactttagatatcgaacttgtttcttcagagttacttgttatattaccaggttttatttgatattcagtttgactcataccttgtatcctcacttggagtatattgtacagaatctgtaaaataaatgttttcttctttattttcgacaaaggtaaattcaagacttctagaacctacggatgaaccttttaaatctccatcgcctttcaataatagtttcggcgcttgtttggttggaatatcatatctttttcttaactgttggacattataatcatcattattcaattgatattttgccgaataacttggtacattaggattatatgaaatatcaccatctttataatcattaatatctttaaagttgccatattgtacaaagaacttaaagttttcaatctctttttttaacttgtcattcggtagtggcttcgttggtatgattttattatgttccatttttaccggataccttttttcatcatcctttggtctgccgttactgtcatctgtcatttcacttataaaataatacccttttgtggttctagtattgcgattgatatagagcaccattcctctcgtttccatatccttaccttttggctcgattaccatttcagaattaactatccaagtacctttatcaccctttttaaattcttgatctcgaaagccttctttatcgtaaaaatcatcgagatttttggttggatataattttaatgtttgattaaatgtgtctttaatttgggcgtttcgaccatttgtttttgtcataatgacataacctacaatcaatataatgagtaataccaagcatataccgagcgttaatttctttgaatgaatcatcatttctccaccttatatttttaatattgactcagtttttaatatttacaactaaagcgaaaaattattttgaacactttatgaaatttttatttcaaacttctattaaccctattcagtaggtttgaaattaatactatcagaaaaatacacattttcttctttatttcttataaagttaaattctagttctttagaacctacggatgagccttttaatcgccatcaccttcatacagtttgaagtcatatttaccaattgtaaatgacgactagatgatatatagttcaagaaacatcaaaattcgttaaaacataatcaaattttattatgttcaaaactttattttccaaaaaataaaaaagaagttaaacaaagattggttgcttaacttccattattgaattcattagtccgatttgacatagatcccgaaaaataatggctaatagccacttatagtcgaaattatgaactatataattcatttattattaaatggattatatacttattgtgtttcttaatacctttttatactttaatatcttgaattttttctaaatcattactaatatcttttaattcgtctgtggcatttttcacccaagccccttgtgccgcatttttaaaatcatcttcaaattttttgaaatgacttaccatttggtcaagtaatattttctcatcacttttcagcttattttgatgatcatgatgcatacgaacatgttcaggcgcaataacctcactaatctgttctttttccttcatttgttccaatactgctaaatctggtaaaccactaaaatcaagtcccacgcttattcatctccttcaattctgtcagattgttttagatattctcttcttaactcatctttataatcttctaatttcatttcgtgatgtcggatacgttgattcgtttctctatcgaaagattctataatacgtgtcatcctgatcatagcgtcttcactataattcattttatgtttgagatataagaaatgatcatacatttgttcacatttcttgcgtgtttgatgtcttaattcatcaatttgattgaatgcatcattcaattgttttctttcttcatcataggcattttcaagttcattaatatttttatacgtagtaaacattacatcatcccatcaatctggctcgctaacatttggtcattagaaacaattgcttcgatactctgtttaatttttgcgatatagccattacaatttttataaacatcatttaatttctttatcttatcatcaatttttcttttgggatctgtttcaagtttactttcatacgcgccaccttttcttaattcatctataacctcttcagaggttaatttttcaccaatttcatttccaacttcttgcgcttttttccagttgtctccaaatttatgtgccatcgcgtgatacattttttcaaatgttggctttcttcattcactaattgatttaagccttcggcaatggttagtgctgttaaagcttctaataattgttgttgggaggaagagagtgatccacccgttgtttgaatccaattcgctcttaacgtctctactttatgtaatctatgcctcgtttgtttacgaacggattttaatgctttattattttcgtcttggtagcctttaactttgtttaattcagctaagattatagcctgtgttctgctcattaaaataccactcattgcatggccttctccatttttaagtactattttttctccagcagtttcatataaatgattgcggacacctgcatctaattcgtcttcatcagacacaaatcttacaatgtgaccatcgtacttttcaatcaattttttaagttcttcttgatcggcataaaggccgctcacatctttgatcgctaatggagctggattatacacaacgatatgtttaatatcattactcatacctaaaatcatcgcatctctaccgcccagcgaatgtccggtaataatatcaatatcatagtcttttttgatatttttgataaagtcttgggtatttttataatgtggatctttatctgtgacggaatgaaggccaatattgacatcggccccaatatcctttagcgtttcactcacatctatatatccttgataagaaggaacaccaaatgtttgttttaatattgcgtctttgtgtacattagtacctgtcatacctaaagtaactttgccagtgtctttatttaaaaaggcgcttgtagtcgtgcctgttttggggtccgtataacttttaagatatgaaagatttttagggaatttatttttttcttgtaactttttaatttgtttatcaattttattttgttttaaaccactgttatttgcgttttctatttcataacttatattagatactgtacttgtttcttcagagttaccttttatattgccagattttatttgatattccgtttgactcatgatttatcatcctcgctaggtgtaaattcgaccgaatctgaaaaatagatattctcttcttgattttctacaaacgtaaattctagatccttagatcctacggatgagccttttaaattgccggatcctttcaattttaattcgggcgcttgtttggttggaatatgatatcgttttcttaactgttgaacattatagtcatcattattcaattgatactttgcagaataacttggcacattaggattatatgaaatatcaccatttttataatctttaaaatctttaaaatttccatattgtacaaagaacttaaagttttcaatctctttttttaacttgtcatccggtataggctttgttggaataattcgattattttccatcttgacaggatatttttttctttactacgtgaatatcctttactatcttcagttatttcggtgacaataaaattacccttcgttgttctagtattgcgattgatatagagcaccattcctctcgattccatatttttcccttttggttcgataaccatttcagaataaataatccaagtccctttatctcttttatcaaattcttgatctcgaaaaccttccttatcgtaaaaatcatcgagattcttggttggatatacacttaatgttttgttgaaattttctttaatttgagcgtttcgaccatttgtttttgtcataatgacacaacctccaatcaatataatgagtaataccaaacatataccgagcgttaatttctttgaatgaatcatcatttctccaccttatatttttaatactgactcaatctttaatttacacaactaaagcgaaaaattattttgaacactttatgaaattttcatttcaaacttctattaaccctattcagtaggtttgaaattaatactatccgtaaaatagatgttttcttctttattttctataaatgtaaactctaaatttttgtgtcctatagatgatccttttaaatcaccatcgccttttattaataatttaggtgctttcttagttggtatatcatacctctttctaagttgcttcacattgtagtcatcattacttaattgatactttgctgaataacttggcacattcggattatatgaaatgtcaccatctttataatcattaatatctttaaagtcaccgtattgtacaaagaatttaaagttttcgatttcttttcttaatttatcatcagctatcggtttggttgggataattttattatgttccatttttactggatattctttttctttactacgtgagtatccttttttatcttcccataattccctcacaataaattcaccttttgtcgttctggtattgcggtctacatacaggaccaatcctctggattccatattctttccatttgtttctattgtcattttagagtgaattatccaagtgcctttgtcgcccttttcaaactcttgatctcgaaagccttccttatcataaaagtcttcaagatttttagttggatacaggctcaacgttttgttgaagttttctttaatttgtttatctttactgctttcttcctttttcattccgcaagcccctataaaaacagctaataatactaaatacagccagagcctcaacctttttgagtgaatcatcatttcacatccccatttttatttttgatgcaaagttaagttcaaattccaatattaataatattagaggaaattttatgattaaatcctcgtggattttaattgttagttgtatttttcacatatcaacatcacaaattatttaaaaagcgcaaatatctttataatttttattggcctaaccaactaattaattaagataaattgcgcttatatttaaaataataacactgaaactcaatgtatttacttattaaaattgatgtttaaatacaactttactaacattcatttttcggtttacattaatttgttagataacgatatatatcatctcttacagctttatccagtgctaaatccatcgttactacgtttgaaccattcggcattttatcttgcttttctgaaccttctatatatccagcagttcctaaataataaaaatatataccatcatcatcttttttctgtacaaaaatatacattttaattccttttgctctatgggacaaaattttctgaacttcttttgattctagcgttctattagatttagtaaaccattttaattcatcttgacttaaaaattcatcttcatattttgtgctatcacttatatcctcatgcttatcataagtgataaatattggcatttcttggctttttatcatgtatcccatgattacagacgaaccatttttattccaattaaatattttactaaaatcttctcttgaatatttattatataaaatcagtccatttttacctttttggtatttttcattgttatactttgataattcaataagatcttctaaaaacatattaaatgtttgattacttagagcattagtaaatgcatcgcttagtcttatcattctttcattacgttctataatgggacttccatagattttttcaattcctgcgttgtaaaatgaaaaatctaaaattcttaatgaagtatctatatcatcttctgttatatccttaacttcgttcaacattttattttttaattcatcatatgttaattcattttttaaaagttcttctaaaactaaactatcgattcttttcaatccaggtgctatttgccttgaaaagaaaaccagatttttagattcattttccgtcaataatgtatctatttttttatatctcactaagaactcgtaataattactaaatttagaaaatataacgcttggatctatagaatgttgttgtatgaaatccattagtaacggcatgtgtcccaatctattttcaacttcttcataagcttttaatattaatttattttgatttaatgatactgcatccaatgaattgtaaatctgttttttagcaacttcttcaaaattaattgtagatactccattaatcgaatcgttattcgttaaaaacttcttataattatctttattttgcgattgatccccagaaagcgcaatcggaattaaataatttgtcttataattaccaataaaatcaattactgtaacatactctttatttgaactttttcttaatcctctaccaagttgctgaatgaatataatactagactctgttggtctcaacattacaacttgattgacttctggaatatcaataccttcgttaaaaagatctacagttataatatagttaatcttaccttcttttaatttttctattacaatttggcgataattaacactatcatctcctgttaaagcaacacttttaatcccttttgaacttagtttatccgctaaatcataagcttcttttttgctacttacaaaaatcaatccttgtaaaatttcacctgaatatccatagtaatctgtcttttgaataatataattaactctttcatcagaagttaaatatctcagtttagttacatcatcttctttaataccttgatgtacataatcagtcacaccaaaataatgaaatggacataaaatatcactttctaatgctgcttgtaaccttatttcatatgcaatattataatcaaacagttcaaatatacttaattcatctgatctttctggtgtagcagtcattcccagcatgaacttaggtttgaagtagttaaatactcgttgataagtagatgcagcagaacgatgtgcttcatcaaaaacaatataatcaaattcattttcatcaaattgcttaaaattatcatctctagataatgtttgaatggttgcaaataaatatttggcatcgacatctctatgttttcctgtcaacaatccaaaatcactatcattttttataggtaatacttttttaaattcttccttagctctatttaaaatcccctcattatgaacaataaataaaaatttattagggtttacttctctaacatctaatgcacataaaatcgttttacctgtaccagttgcagatattattaacgccttatctttggctttatccctaatagcttttaatgaccttaatgcttctgcttgcattaaattgggtacaatttccactgattttttcaccttatcagctagcagcatttgagtttgttcaacctccgctaatttttctaaggaacggtactcaaatgattctttatatgaattaatccattgctcagtcagtggggtactcttttgccataacaagtcaaattcactttttacactatcaactaaatcgccatttttcatagtagacagtaaaacattatgctcataattaacctttaacgcattagatgttaaattagagcttcctattaccatagaactataatccttatgctcaaaaatatatcctttggcatggaatccagcaatatcagttaatcttacctctacattttttaatttaagtaattctccatacattttaggactattaaaccctaagtaattagatgttaatattttccctttaacacccttattgcttaaatctaatagttgagcctttaagctggctaaaccgctttctgttataaaagccacagaaaaataaaacgtttcacatttttgaagttcatctataattgttgaaagaactttttcatttttattatttactaaaagcttcggtgtataattccctttatgagaaatatgtttgtctataaaccctttatgtaaagattgattgaaatcatttagtaatctactcatattatccctcagtcataattttattaacggctggtatatccgctggggcccaatttaatttatcaagttcgtttattgacaaccattcaatactcttatgttcagttagagttggtaactctttgtttaaagtacatttgtatgttgttaacctaacaattccaaaatcatattcatgttctgtagttataactttgtctccaacaattaaatcacatttcatttcttctctaatttctctaatcaaagcgtctttttcagtttcattcttttcaaccttaccgccaggaaattcccacattaaaggcagactcattttttcacttctctgtgcacaaagaattttgttatcagaaaaaataatagctcctactacattgattacttttttcataagactcacccttcaatttaaaatcatcttaattgttattctatcaaaaattacaaaactatatataaatcaatattaaaaattaatattttacattcacatgaacgctctactccatgcattttcatacacatctattatataatacttgtgaaaagtattgtcttggggctgtgtttttttacttttggggcgtatttctttataattcattacataaatgtaagggctttagttttcatgttttattaagtctaactgagattttgaaaggatgtttagcaacaatggataaagaattatggatagaacgagctaatgatagtttagttaaacatttttatgagcagcaatctgacattgaacagcgagaaggttttgaaagtaaattaacatttggtactgcgggtatacgcggaaaattcggtcttggtgaaggtcgacttaataagtttactattgaaaaattggcattaggtttagcgcgttatttaaatgcccaaacaaacagtccaacaatagtcattcattatgatattagacatctttcaactgaattcgcccaaataattgctaatgtattagcaaaccatcaaataacagtttatttacctgatacatataaaacgacaccggaattatcgttcgcggtgcgcaatcttaatactactgctggcattatgattacagcaagtcataatccgaaagactataacggcatcaaagtatatggttctgatggtgcgcaattatcgactgatgcatctgagcttgcaagtcgttatatcgaagaagttggcgatccattacagattgatatacctatttctaaacaaaatacatcttatatcaagccttttccgaaatctgtaactgatgactatatgaaacacattcaaaatatgattggctatattcctaaatctgatttacaagttgtgttcactagtttgcatggtacaagtgttccgattgtacctgagttattacaatctttgaatttcaatcaatttaatcttgtagaagcacaatgtaaacctgatccgaatttcagctcagttcaaagtgctaatcctgaagatcatcgcgcttttgatcaagcagtcgaacttgcaaataaaagtcatgcagacttattaatatcaactgaccctgatgcagatcgacttggtattgctgaacgtgatgcacacggtcatatcacatattttaatggcaaccaaattggtgcgctgttacttaattatcgtattcaacaaacgtctcaattacgtcaccgcttaatgattcaatctattgtaagtagtgagttaacaaagtcattagcacgctataataatgttgaatacaaagaggtgctgacgggctttaaatttattgctcaggaaataagacaactggatgatcatcaaaatatgattttcgcatttgaagagagttacggttttctatcagagccttttgtacgtgataaagatgccgtacaaattgtgccactcattataaaatacgcttctgagttaaaattatatggcaaaacattgaaagatgaattagaacagatttatcaaactgttggtagacatgaggatacattattctcgcatacgctagaaggatttgaagggaaaaagaaaattaatgcaataatgaccaaattccgttcaaatccaccgcaagagattcaaggactcaaagtgaaagcaattgaagattatttaactagcgaggtttatcatttggataaagatacaacgtcgcagattaattctcctaaatcaaatgttattcgtgtcttatttgacgaaggatttatcgctttacgtccttctggtactgaacctaaaattaaattatatgtgtcgttaaaatgtccgaattttgatgatgtagctcaaaaaattaatgcgatgatttttagctaattaaaaattttatacatcgaaatattacatttcattttatgcttatcagcccttttgaaactagaatccttatgttttcgcgttttgaaggggctaatttgtaataatttttcaaaagtatattagaaaattaattttcatgtatttttcatattaagcggtaataatataataattaataccgcgacctatttaattgttttcgcgatgaaaaaggtttagaattacaaaaataactattttaaatttagttacaaatatattttagaaaggatgtgaaataatgaaaggctctaaacaaatacttttgattatgggcattatatctcttattgttttatttatttttacactattcatcatggcgcaatatgcaaaacattatgaacaaaaatccgacagttccaacgcacatactttaaattcatcatcagccataattgagcaacatactatgtcgaatttagcgtctctagatttatacgctcctgttcgtaacattacttctagtcgtgatattcatcccatttatttcatgacaaaagattaaaacttcctttttcataaccccattcattcaactaataaattaaaaaatgataaaaacgtactgttttttagaaacatacatatataagaaacgcatccattactaaaagacagtacattatattctatcaggaaggtgcaacaatgaccgtcaacatcgtatttagtatcgtattctgcataagtatggttatattaggcatttatgtcgcaataactaaagatttcacactaatctcttttataaatcaaacggccattgcagataaacacaagaaccaaattgcatatatatttacgctatgtataagtttgagtgcagtatttttaatgtcttcaattctaagctttgaatatgattttattgcattagcattcttatttttaacgatagcattattacttatcgcattattctacgtttgcttttataaaattacaaaatacccataaatgtttgtgatagtgtgttggttagatttattgatgcgctgtcagtaagtaattgtttgcgaaaaaaatacaaccttgtacgaatacaaagttgcattaatatagaatcatttatgctttttaatatcacaaaacaaattgattaaactagctaaaatagtcaaaattggaatcaagattacataaatatcataacctctagatattagtatacataatataattagcgaccctattataattgctaaattataagccaaactaattttatatttcatttcaattcccaccttaatagcatttattaaaattctataatgtttacatagacttcttaacaaactttaacccagctaagctaagtattgaaataattacacctcctaatataaatatattacttaagcttagtaaaggtataattatacttatcagtcctaaagacaatgtatccgctgcataattcgatgtagatgagatactaaatactttccccatcaaatgatttggcgtttttatttgaatggcaactgatcttgttagtccctctatagattgtccaagtcccaataatgttgcacctatatataatatcgccacacttggaaacacattaataatcgataagccaattccccaaactaaaacaccaatactaaatttaaagattaatcgcttttctgacagcaaacccataatcaatgacattaataaagatgctatacctaaacatgatgtagctagtccatatacaccaacgccctcttttaatatattggaaataaacaatggtaatacaacacgccaaaggccagtattaatcaatatgcaggcaaattggatgattataataaatggaatttctttagattgtttcaagaattcccaagtttcagaaaaatcttcttttgagtgtctatcaatcatgttgttatttgtatattttaaaagtgcattaaaaataaatcctaaaaatagcaatatactacaaataaaaaagacgccaacattaccaactagtattacaatgacaccaattaaagcaggtaaaataatatttgagcctctttgcaaactatcgattaacgcattacttgttgctaaatgctcctcatcaataatttcaggaagaattgccctaaacgcaggatccgtatagcagttaataatggtgatagctgtagatatggttagaagcgtcagataatttaaatttgatgttattgcaagtaaaggaataattattataatcaaacttagtataagatcagatagataaagtattttctttttattatgtttatcagaatatgcgccaccgaaaataccaaatataataaatggaagtgtttgactcataaccatcattgataattttaaagatgattggtttgtcaattcaacagtaaaccaaattatttgtaacgaaaacagcacaaaacaactccgacgtaagaaattaccaatcaataaatatgtaaagtttctatttttcaaaacttctaaatacaacatatttatcacctctcataaaaataattgaatgcatccaccagcttttttagaccttcttctaaactctctttatccaaagcgcaattaattctaatataatttagtcagttaaatatcaattatttcgaaatatacatactacttgaaacaccatacataacccccaaaatgactactcagaggttatattctactaattatgattatattaaatatgaaaatattatcaaaaaaatcaaatttataacaaaaatacaccccttaaagttaggtctttcaatccaacttttggggtgtatatcattctcatcatattctaggttgtttttaacaaactaaatatagtgaatgcaaatcaactattatttaaattatgaattattttaattctttcttctacgagccaataacattaatccagcaattccaattatactactaaagatcaaacctttttgcgtgctttctaaacctgtttttggtaattctgctcgttttttctcttgattagctactgattctttagcaattttagattttttaactttatcatttttatccattgaatgaactgggccatttggttttgctctgtctttcgataatcctggattgttaggatttactgggccacttggatgagttggtctgctcggcttctctgggttttcaggtccttttggatcttttggtttctctccaccgaactctacaatcttatctactggttgttttgtgatctcttctgttggttgaccctcgccaactttttcacctgttaatgggttcactgtgattggtgttgtgattgtcttacttcctggttgtccttcttgtttcactcgctcttcaccaggttgtaattttggattaaactcacgttttgtttcaaacggtatctctactgtttttgtttctggtgtacccgtttttggtccgtgtttaatcacatcatccactggctcttcgatcacttttcctgtgtctggattcttgattcctggtttacctggtactttttccgtttgatctgtgggtaagtttggatcaaagatatctttatgaccttgcggtattttctcgccaccgaattctgttaattcattaactggatcttttgtgatttcttctttcgattcacctttactaataatttctccagttaatggattttttagtgttggcgtcgttattgtcttctcacctttttgtccttctcttgttactttttctgtccctggtgctaaatccggattaaatttacgttctttctcgaatggaatttcttctttttctacaatcgagtctccttttacaggtccatattttgttacgctatcgaccggtggtctaactacatctcctgtttctggattcttaattcctggtttacctggaacttcctctttctctcctgttggtaacttcggatcaaattcgtctcgatgacctggtgttatcgtttctggtccgtattctgttaattcattaatcggatcttttgtgatttcttctttcgattcacctttactaataatttctccagttaatggattttttagtgttggcgtcgttattgtcttctcacctttttgtccttctcttgttactttttctgtccctggtgctaaatcaggattaaatttacgttctttcttgaatggaatttcttctttttctacaatcgagtctccttttacaggtccatattttgttacgctatcgaccggtggtctaactacatctcctgtttctggattcttaattcctggtttacctggaacttcctctttctctcctgttggtaacttcggatcaaattcgtctcgatgacctggtgttatcgtttctggtccgtattctgttaattcattaatcggatcttttgtgatttcttctttcgattcacctttactaataatttctccagttaatggattttttagtgttggcgtcgttattgtcttctcacctttttgtccttctcttgttactttttctgtccctggtgctaaatccggattaaatttacgttctttctcgaatggaatctcttctttttctacaatcgagtctccttttacaggtccatattttgttacgctatcgaccggcggtctaactacgtctcctgtttctggattcttaattcctggtttacctggaacttcctctttctctcctgttggtaacttcggatcaaattcgtctcgatgacctggcgctattgtttcaggtccgtattctgttaattcattaatcggatcttttgtaatctcttcttttggttcacctttactaataattactccagttaatggattttttagtgttggtgtcgttattgtcttctcacctttttgtccttctcttgttactttttctgtccctggtgctaaatccggattaaatttacgttctttcttgaatggaatctcttcaactttttttctaattctgttattgtttttggcgcttctggtgtaaaagtaaactctgaacctttcaagtcagttctcatccagccatttgcatttatcccttgattaaggccccatctttgactagatgtaattaagaaattatatgcctgatttttagataaacctaaatctgttattgaagtctcccaagttttaccagcatattctgctctcattttaccagttgaagcaacataagttaagatgacatcatttaaacgttgcccatgaaactttccatctgatgtattagttgaattgtccgcatagtttaaaaaattagtttttgatttatcaatattttctccaaccatttgtgaattaccagaactgtcatttttcacaaaagctccgtatcctctataaccttgtccagcttgcttttcagttttgtccatggaacttgtataaatgtatccagtatcaattttaaatccgcctgaatttaccagacctttatccccaaggattccaccattagttaaatattcttctgcatttcctttactaaataagaacccccaaccatcagcacctgtggtatttgattgatggttatttgccactctaactttaaaattgaaatccttactaaaatctattttattttttaattgtaaagctcctatcaaaccattactttcattaccaacattaaacctggttacctctgatacccctaaatctgttggttttttttgtatatcaacacttccgtaaccttcaaaatgttctttaccttgaattgtaattggggtagattcaactacatttttagaatctcttgtaatatcaaaagagccttcatcaacagaacgagcttttctaaccttaggtgtctctgcgttatgagtgactgacgatttcggctgaacttcagcaacatcagctacttcttttggtgtatcctccttttttgatatatcttcagcttttactgatggttcatgttcgattgtgtctttgtttgaagttacttcagatttagcttctacaccctgtggtgcagtgtctttgtttgttacttcttcaatcttcacttcttttgattggacattatcttttaatgtagttggattctcaatattgttttcagctgcttctgcctcttgttgagttcccaaatacattagtgagccaattaaaatagatgctgttccaactgtaaattttcttattgaatatttattcaatttatttgatagaaaatctactcttttatttaccggtcctttcttatctctcatttgcatactcctttttccatattttccactttgcttacagtgaatttacatgtaattttacaaatacaataggagttgcacaatggaatataacacttatctttataaaattattttatatattgacgcacttaaaacaatctacaaataaaattattatttttagttttcaatgaataattcattcttatctgttggaaaaacccatcaactcaatagcattgaatttctaaaataaaaaataccttaacgcatttaaaaaatacatttaactgcaccaagatattaaaatctcgaaacatactttatgtttcattaatatttatttcactcaaaagatttttaatataattgtgttgttttacagaaacaacaatgattacatttctactatcatgtgggtctctacatttattcaagtaacccttttttgataaatcttttacgcttttaacaattctagattggtctataccgatataacttataatgtctctcataaaatatttaccttcatcatttttaaatacatctaaatatgctaatactaaataattatctaatgtaagacaaaaatatttttttaaatatttacgcagctcatatgtagttaatactcttttcattaatttaatattgctcttgcttttcaaatcattcatcaagtcttcatcccttacttttaattgtcacgtcaaataatatttgtctttaactagtaataactccaaatatatttagtttgtggtgctagctataaacacaaatgaatcataacactatattttgattttgttcaattgtttttatttttggataataaatgaatttgtcatttgttattctgtgatttttagttatttatattttatatatatattatatataaaatatttaggttaacatgtctttaaaagagattgcttttatattactttaaataatataaagtattgggacatcagaaaatagtaggagaatgtaaggtggactatcaaactttcgaaaaggtcaataaattcataaatgtagaagcgtacatattttttctcactcaagagttaaagcaacaatataaattatcattaaaagaattgttgatattagcatatttttattacaaaaatgaacacagtatttcactaaaagaaatcattggtgacatactttacaaacaatctgatgttgtaaagaacattaagtcactatctaaaaaaggatttataaataagtctagaaacgaagcagatgaacgccgtatttttgtttcagttactccaatacaacgtaaaaagattgcttgtgttattaatgagttagataaaataattaaaggatttaataaggaaagagactacataaaatatcaatgggctccaaaatatagcaaagaattttttatactttttatgaacattatgtactcaaaagattttttaaaatatcgatttaatttaacatttcttgatttatctatcttatatgtaatatcatctcgaaaaaatgagatactaaatttaaaagatttgtttgaaagtattagatttatgtatcctcaaattgttaggtcagttaatagattaaataataaaggtatgctaatcaaagaacgatcccatgcagatgaaaggattgtgttaatcaaaataaataaaatacaatataacactattaaaagcatattcacagatacttccaagattctcaaaccaagaaaatttttcttttaaatttaaacagatttacctcttgataaaataaataagcaatcatactacttctcaatttagtataaataaaaatacataattaactttcttttgtttttatattatttcaataccctactatatatcacaacacataaattaagcatgacactcattcaatttagttcaccatttcgtgttccaattttactgagtatcatgcttttaatgttataaacctaatgctttaataaatcgtgttaattcttctcgcatactgtcatctttcaatgcatattctatggtagttttaacgaagcctaatttttctccaacgtcataacgttcgccttcgaagtcatatgcatacacttggttatcattattcatacgttcaatcgcatctgttaactgaatttcgttacctgcgccttctttttgcgtttttaaataatcgaaaatttcaggcgttaatacataacgtcccataatagctaggtttgatggtgccgtaccttgtgctggcttttcaacaaactttttcacttcatactgacgtccgtttttagttaatgggtcaataattccataacgatgagtatctgcttccggaacttcttggacacctataactgagtgccctgtttcttcataaacgtcaatcaactgtttcactgctggcacttcagattcaacaatatcgtcacctaataataccgcaaatggttcattgccgataaattgacgcgcagaactaatcgcatgccctaaacctttttgttctttctgccttacataaaaaatattcgcaagttccgttgaatactgaactttctctagtaattcagatttacctttttcttttaacaccatttctaattctttttgactatcaaaatgatcttcaatcgcgcgtttgtggcgacctgtcactataataatatcttcaattccagctcttgcagcttcttcaacgatatattgtattgtgggtttatctaagataggaagcatttcctttggcatcgctttagttgctggtaaaaatctagtccctaaaccagcagcgggaatgattgccttttttatttttttcaaagttaatgtgctccttttcctaagtattaaatctatgtatcaacgtcattttaacactaattagaacgccttcatagtgtcattgagtatgtaattatttcttgggaaatttgttttaattttaaaaaacaggcttacttcatataatttatgaaataaacctgtcaattttggattgattatgctttgtgattctttttatttctgcgtaataacgctaaacctaaaatgctaaataatccgccgaacaacatgccgttgtttgttgattcttctccacctgtttcaggtagttcagatttcttagattgtgcttttttagttggtaccactgctttaaccttttcattgatttcaataacaggtgttactactttaccttgttccactggtttagaaggttttttaggttcttctttagcaggtggtattggtttaccaggttcagttggtacctctggcgttggcggtgttggtgtttccggctcgcttggtacttctggtgtcggtggtgttggtgtttccggctcgcttggtacttctggtgtcggtggcgttggtggcacgattggaggtgttgtatcttcttcaatcgtttgttgaccttcattatgaccacttacttgtggaagtgtatcttcttcaaagtcaacactattgtgtccaccgaattgataatttggtttatctttatttgtatcttcttcaataatttcagtgtgcttattgaatccgtgaatatgtggcacactgtcgaagtcgatatcaatgatattaccaccttgttcatacttaggtttgtctttctctgtatcttcttcgaatgattggttaccattattttgaccatgaatttgaggtacactatcgaaatcgatatctacgatattgccaccttgttcatatttcggtttatcttcttctgtgtcttcctcaaatgactgattaccgctattttggccaccttcgtaacctaattcactcttaatatccacgtggctattttcttcgatttcttcaatcacgccataattaccgtgaccattttcagttcctaaaccagaatgagaaatatgatgattgttttcagtaatttcctcgattggtccttgcgcttgaccatgttcttcaggtagttcatctactagttcaatcagattactttcagtcgtatattctttcgtatcttcaattgttgtatgatcgctaacagcaccagttacaataccttttgtagaatcttcgtcaaattcaactaggttagactcagtagtaacctgaccaccacctgggtttgtatcttcttcatattcaacaacatcagcatgatgttttgaattttcatgtgtcgattcttcaaagtctacatgaatagaatcttcttcagtttcaatggtaccttctgcatgaccttctgcaccttcaacagctgtatgatattcaaaatcaattggcttagaatcattactttcttcgattgtaccagtcaattcatgcttctccactggcggctctgatttaaattcaagttcgataggagtactatgttctataataggttcctttagtttatctttgccgtcgccttgagcgttattagagtaaaatgcaacgccatttttccaagttaaattacttgtataataatagttataatatccaaaaaggtgtgtttgaaattctaagttgctagcatttgaatcataatacccttcatattttattacataatttttactttggtctaaattattaaagtttaaagaataaccaccattagtatcaaaatctaaactcatattatcagtcacatcttcaaatttgctgacatcatcaagctttgcatatacgctttcagctaaatcgtctgaaccaatgtgtttatataccttaactgttggattattaacccctggtttatttcctttagttacttgaccagttactgtcacagagcttaacgactggttgttaggtttcatgtacgcaaaatgactaaatttcccatctactttatttaaagtatcaattcgaccattagctgttactccccaattatctctaactccacctaaatattgaatattaaatattttgctaaccgtagtctcacccaatttaacttcaacattttggttacctttttgcgtcactgttgtaggatcaataaatagatttaaagataattcagcagttaaatctttcttttcttgtacatattctttaaacgtatatctaacttttctttctccaattatttctcctgtcgccataacttgaccatctgtactttttatctccggaactttacgcagtgttgagataccatgagtttcaacattatcgcttaatgtgaaatcaaaataatctcccgccttaattccttctccaaatttccatttatatttcaaggttactctttctgcgttatgaggatttacaacattcgtatcttgtttatgtcctacaatttcactaccttcttctacttccactttatttgttacatctgtacctgtcgctttagtttcttccactacttctttctctgcaactgctgtaacgtcagttgatcttttcattcttggtttaatttctgagacgttacttggttgagctatgtcaacttgagttcctgtagtttccttatcagcaactttttccgatggcaaatcaactcgcgaagtttctacttttggtgcttgcacagttttcggtgcttcttctgttgttacttgtgttgattgtgatggttgctcagttgatgtcgcgctgtatgattgtgtttcatctattgtattaacgttatttgtagttgtttgtgtttcgcttgctttactttcagtagctgaactcccactttcctctactgtagtattgttttgttccgatgctgcagcttctttttcttgtcccattccaacaacgatcattgttcctaagaatactgaggccgctcccaatttgtgttttcttatgccgtatctaagattgcttttcactataatattctcccttaaatgcaaaattcatttatttttaaaactcaataaatgcaattctatattgttcggtttttaaaagcaatgaaaaaaagcgagttaataaaaagttaagattgttgttaactttatgtataatgagttttttattatttgaaactcacatatatattgcatacaaagctcttgaacaccttgatataacaggcttgtattttttatacttactttttaaattaaattcaaattcatctaatttaaaacaatatactaaaccatacataataatcgcctgtacaatgcatcattaacaagtcactgaaacgcctttcattgtattaataacgtcactataatttttatatcgttcggtttttgtttgattttaatgattatttatacaaaaacagccgtatttcaagccgacattttaaatttaactaaatttgcatctagttaataattgcatttatcaaatttgtcttattgatccaatctaatttgtactcacaaactagtttaaaattctaactttatctctcagttcgttatcaatcatcagacataaaccaatgaagcaatcagaaaacactctaattttctattagaaatttgatttaatataaaaaaacaggcttacttcatataatttatgaaataaacccgtcaatttttgtttaattatgctttgtgattctttttatttctgcgtaataatgctaaacctagaatgctgaataatccgccgaacaacatacctttgtttgttgattcttctccacctgtttcaggtagttcagatttcttagattgtggttttttagttggtgccactgctttaaccttttcattgatttcaataacaggtgttactactttaccttgttccactggtttagaaggctttttaggttcttctttggcaggtggtactggtttaccaggttcagctggtacctctggtgttggcggtgttggagtttctggctcactcggcacttctggtgtcggtggtgttggtgtttccggctcacttggtacttctggtgttggtggcgttggtgtttccggctcacttggtacttctggtgtcggtggcgttggtggcacgattggaggtgttgtatcttcttcaatcgtttgttgaccttcattttggccgcttacttttggaagtgtatcttcttcaaagtcaacactattgtgtccaccgaattgataacttggtttatctttatttgtatcttcttcaataatttcagtgtgcttattgaatccgtgaatatgtggcacactgtcgaagtcgatatcaatgatgttaccgccatgttcatacttaggtttgtctttttctgtatcttcctcgaatgactgattacctttattttgaccatgaatttgaggtacactatcaaaatcgatatctacgatattgccaccttgttcatatttaggtttgtcttcttctgtgtcttcctcgaatgactggttaccgctattttggccaccttcataacctaattcactcttaatatcaacgtggctattttcttcgatttcttcaatcacgtcataattcccgtgaccattttcagttcctaaaccagaatgagaaatatgatgattgttttcagtaatttcctcgactggtccttgtgcttgaccatgctcttcaggtaattcatccactaattcaatcagattactttcagttgtatattctttcgtatcttcaactgttgtatgatcgctcactgcgccagttacaataccttttgtagactcttcgtcaaattcaactaagttagactcagtagtaacctgaccaccacctgggtttgtatcttcttcatattcaacaacatcagcgtgatgttttgaattttcatgtgtagattcttcaaagtcaattggatttgattcctcagaggactcagtgtatcctccaacgtgacctgcttcgctatccacagcagtatggtaatcgatatcaatagctgatgaatccgtttcttctattgtttcaatgtatccatcaacatatccacctccaccatctatagctgtgtggtaatcaatgtcaagagttgatgaatcatattcctcttcaacagtagttactaaattcttatcatattgacctgtaagagtttctttaattgtatcttctttatattcaaatttattattttgaataatcggaccatttttcccatttccgttcgctttattactgtataaaactaaaccattatcccaagttaaggtatatcctctatcataataatacttataaagttgctctggatgtcctaccatttgtgttctaaaatcaacttcatcagtaccatttaaatactctccatcatagtgaacaacataagttttatctagattttctatattcaatgaatagcttccattattttgtaaattcaaattcccactcatattacttgtgacttctttaaatttagaagtatctgtcgtatttgcatatacactcttcgctatgtcttcattattacccaagtattcaaatatcctaacttttggttgatttccattctgattactacctttcattaaagttccagtaacagtcacacttgtcgttttaccattattaggtttaataaatgcaacatgcgaaaatctattattcgctttattaaatgtctcaatcgatccatttaaattggcataataattcccaataccatctttatatttaacatctaattcctttgaagtttgttcttcatttagtgttgaagttatagtttgatttccattagtttgtacagttttaggatcaataaataaattaatttctagttcagccgttacatcaaccttatcttcaatatcatttgtaaatgtatatctaatctttccaccttctaaaacttcacctgtcgccattacgactgaaccatttttaatttctggtacttttctagcagttgatacgccatgcgtatttacattatttgataaagtaaagtcaaagtagtcaccttgatgtaaaccattctcaaatttcaacttatattttagtaccgctcgttgtcctgcatgaggttctactttatttgtattgttatgcccctcaatagaaccaatttctactgtaactttacttgttacatctgtacccgtttccactttcgcgttactagcttccttagcttccgctacatctgctgatcttgtcacacgtggcttactttctgatgccgttcttggctgtgccacttcaacttgtgtttctgcgacttgattttgtgtagcctttttaggtgttaaatctacttgtctttgatctccgctattgtcttgagattgtgttgtttccttaacttgaggtttcgcttcttccttaactacctcttctttaactgtttctatatttgctggttgtgcagtttgtggtgcttgtactgcttttggtgcttcttcagttgttacttgtgttgcgtttgacggttgttctgttactgttgcgttatatgattgagtttcttctatatgattaacgttagttgcagttgtttgtgtttcacttgttttattatcagtagctgaattcccattttcttctactgtagttgtcttttgttctgatgctgcagcttctttgtcttgtcccatcccaacaacgatcattgttcctaagaatactgatgctgctcccaatttatgttttctaatgccgtacctaagattgtttttcactataatatctccctttaaatgcaaaattcattaattttttaaacttaataaatgcaagtctatattgttcggtttttaaaagcaatacaaaaaagcgagttaatgaaaagttaagattgtcattaattttatgttaattgataattttattatttgaaatatacctataaattgtattcaagtcatcagaaacccttgtcacacaaggcttgtattttttatacttatttttttaaattaaattcatcattatctaatttaaaacaatatactaaacgtttcataattatcgcctgtacaatacgcacaaaaacatgtcttgaaacgcctttcatcactctaaaatacccaatatactttttatatcgttcggattctgagtatttcagacgattttctgcataaaaataaacgtgtttcaaggcaatatattgcaattacctaaaaacacgtttacttaatatttagttaaacaaataagctaatgaataaaatgaagatgatacctgaaacggaaataatcgtttctaataatgaccatgttaagaatgtttcttttacagttaaaccaaaatattctttaaacatccaaaatcctgcgtcatttacatgagacaaaatcacactacctgcacctatcgcaagtacaactaatgcaacatttacatctgatgattgtaataatggtaagacaatacctgtagttgaaatcgcagctactgtagccgaacctaatgcgatacgtagcacagctgcaacaatccatgctagtaaaatcggagacatctctgtaccttcaaacattttagcaattgtatttccgacaccgccgtcaattaatacttgtttaaatgtaccgccaccgccaataatcaataacatcattccgattggataaatcgcattcgtcactgattccataatatgattcatcttacgctttctcattaatcccatcgtaacgattgcaaataatactgctattagcatggctgtccctgctgttcctatcatataaatgatagattcaaatagatttgtaggtttgtcatgcccagttacaagttgcgttatcgtagacactaacattaatatgactggtaatgttgctgttaataaactcataccaaatcctggcatctcttgatccgtaaattctttttgtgcacctaacgctgaaatatcgccttctcgtgtatacgcagacggaatcattttttgtgcaactttgttaaatataggccctgcaatgagtgtaactggaatggcaataatcataccatacagtaatacatctccaacatttgcctttaattcttttgcgatgactaccggtcctggatgtggtggtaaaaagccatgtgtcactgataaagctgttaccataggtagtcctagttttaacactgaaacatttgcgcgttttgctactgtaaatactaatggaatcagtaagactaaacctacttcaaagaacaatgcaataccgacgataaatgctgcaacaagcattgcccattgtacatgtttttgaccaaatttttgaatcaacgtgtctgcgattcgagttgcaccaccaccatcagcaagcaatttcccaagtatggcacctaaaccgaatatcagtgcaatgtggccgagcgtactgcccattcctttctcaatcgtctccataattttagtcaatggtatacctagcattaacgctgtaatcatcgatgtgataattaatgaaataaatgtatttaatttaaacccaataattaatactaataaaataacgatacctaaaacaacactgattaacggccatatttcgttaaacatgacattcccctctttctcttttcaatagaatgtaacaccgtcgtcgcgcacgtattccacataatatatagtagtcatggcacaacaactttatctaagatgcttgagtgacgtatttattgtgttttattttcagcgatatgttggcgttgaaaatctgcaatttgttcataattctctgttaaagaacgacttaaattgataaaaatggatacgatctcttggtaaacagtgacattttcttcaatcggcgtatgattgtttgtggcaccgaccatcgatgaaacgattgaaaaatcttcaatgtcacctacagctttaagtccgagcacgcaggcacctaagcatgaactttcataactttcaggaaccactaactctgtgtcaaatatatctgacatcatttgacgccatacttcacttttcgcaaaaccacctgttgcttttatcatcttaggtgtttcattcattacttcaataagcgcaagatagacggtatacaaattgtaaagaacaccttctaatgcagcgcgaatcatatgttcttttttatgagataaagttaaaccgaagaatgaacctcttgcatttgcgttccaaagcggcgcacgttctcctgctaaatagggatggaatattaaaccatctgcacctggtttaacacgctttgcaatttgagttaagacatcataaggatcaacaccgagacgtttcgcagtttcgacttcactcgctagcaactcgtcgcgcaaccatctcaatacgacaccaccattatttacaggacctccgatgacgtagtggtcctctgttaagacataacaaaatattctacctttgtaatcagtacgcggtttatctatcacagtacgaatcgccccagatgtaccgattgtgacagcaacttctcctttaccaacactattgacacctaaattagaaaggaccccatcactcgcaccaataacaaacggtgtatctttattaagccccattaatgttgcataacgttctttcatacctttcatcacatacgttgttggaactaattccggcaacatttccttggaaatacccagcagttctaatgcctcaacatcccaatctaatgtttctaaattaaacatccctgttgcggaagccattgaataatcaatgatatatgtatcaaataaatgatagaaaatgtatgttttaatatctgcaaacttagcagtacgttgaaatacatcttgccattcatgtttcatccaaaaaatcttcgctaatggcgacataggatgaatcggtgtgcctgttcgctggtaaatcgcattgccatcatgcacttcatttattactgttgcatattttgcagcgcggttatctgcccaagtaatattatttgttaatctttgatgttgctgatccatcgcaatcaagctatgcatttgcgcactaaatgacacaaacttaatgtcgtctttattaactttggattctctcataacatatttaatagtcattagtactgcatcaaataattcatctgggttttcttctgagacatcaacgtttggtgtgtgtaaatcatagcctatttgatgtttcatgataaaagttccattttcatcatataagactgacttggtactcgtcgttccaatgtcgacaccaatcatatatttcatgataaatccttctttctttcattttaattcaaccaaaatccttcaatatctttaccaacatcgtcgaaatttaaatgaaacgcttctttcaaaatttgactgtcgtattgttccactgcatcaataaacacttgatgattatgatgtatgcgttcaaaatcttgcgggttctgttgcatacgttgtcgcatggatgttaaaacgagtgccatcattactggttttaaatgactccaaaatgagtttaaatattgatgattagatgctttgattaatgtttcatgaaattcaaagtcatgcttcgtaaatgattctgcatcctcaaattttactgccactttcatcatttcaagttgtttcttcatttcttttacgatgggtagtcgctcttgatttttaactcttgaaaatgcaaatgactctaacatcagtcgcaaatcatacatttctttcttttcttgttccccaaacggcaacacatgtgcacccattctttctaattggatgagttgattttgttgcaataatttaaatgcatctcgaattggcgaacgactcacattaaattgctttgccatttgattttcagtgagtaacgtaccttcagctatgtgaccattcacaatgcctaagcgtaattctgccgcgataccttctccagttgtcataccttccaaccatttctctggatatccatacatcatcaaagtcactccttcattacacgacatacttgtatacaagtatgttaatatagttattatgagtttgcaagcgctttctttacgagcactaaaatagtgaccaccccttttcgatttaaatttaaaggaaatggtcactatcacacgaatgatttaattgttatgttgtatgtgggatatttctaattgttctgtactcatatgcgctttaggtacttcaatgcaataatgcgtttcatgacagtttggacattcgaatcgacgtgttgtcgctgtatgtttcgctttgataactgcccacaaagatggtgagaatatatgctggcagttaggacataaataggcaaccttttgttggtaataaaaagtaacaccaatgccataaccaatcataaatggtaaagcaattaaaaacggccatttatttttcatcaaaattgcacttataatgctagaatattgaattattcctataataccagcactaatccaaatgttacgacgaatacttttcatttcagctgatttactcatgacatgctctatgtcttttaagtgtgtgattggagacgtcgacgcttcatttacgtaatattgaacatttttaattttgtttaataccgcttgttgctgtttaacttgttggttaatttcttgttgtttcatagttagtaaagtattgagcgtcttcaaagtaccttcaccttttagcaacatatctatatcgcttaacgcacaacctaaatctttaagcaataagattaactctaatgtttgtcgctgttgttctgtatacacacgacgctttccttctgtaaatccttgtggtttcaaaatacctttgcgatcataatattgaatcgttcgtgttgtcacattgcataattttgcgagttctccagtcgaatagttagacatagattccacctcctataattaccatagttgatgacccgacgtcacgagcaagtacaatttccacattttaaagaaatttattatactaggcgtcttatttttatgatttcgtaccatgttgatttacaaactcactcaaactaagtaacacacctactaaacatctactctgttatttcagaatgaatttgttgtaatttatcttcaacttcagtaatctctgtcgcacattctttcagtaaatctcgatacttttccgtctctgcattgtttttataacgtattttatgttctaaacttgcccacatatccatacctatcgttctaatttgaatttcaacaggcaatacctcaacgcgttctgctaaaaagactggaatagatacaacgatatgtaaactgcggtaaccattttctttagggtgctgaatataatctttacgttttatcaattgtacgtcttcttgtttaagcaacatctcttcaatcaaataaatatcatctaagtaattacatactacgcgaattccggcaatatccagtatatgttctttggcagtttctgcgctaatctgtaatcctttacgattaagcttttctattaaactacgcatttctttcacacgtcgctccatatgatgtataggattgtgtttataaatgtgattgaaattgtcatctaaaatactcagtttagtgcttatttcctttagtgctgacgaataaatatgatctaactctacgaaacctaataacgtatcaaatgcttcatcaccattttcaaatttacttaagctatttttaaaatcatgtcgcaaatcctctaaatatagtgatggttttcgatctacatacatttttatactaacctccgatatataatcatctttattgtacctaacattttattaagataatactaatacactatcgaactttgggctgatactgaaacagcacaaagaaactcaaacaattcgaattatgtatcaaaaccttcaattacaggaagtgattttaaaatgatttaacgcaaaaaaacacctgttaccgttatataggtacaagtgcttaattgatagagatgttatacgtctttaaatgattccacaacttttggatgtggaccatccataagcggttctctttgtcgaacgccaccactttggttgccaattgattcgctatcaaagtacgatttatcttgatttgattgttcttgaatatgttcttcattatcagttgttgcatattcactatccacctctgttttttccattgttgctgtatggaattgtacgaagttctcttcttctaatgctttgatttcttctttcgataacgctcgataccaatctttcgcttttttcgccgcaataggaacaacatctttttcaagatatccttcttttaacattgcattcgcaatttctatcgctttttgccgtttaattacttcaaattctttccatttttcggggtaacctttcattgtaaagggcatttccttaacctccaatatgttataattcatgttatataccaccataattataaaatgaaacatattaaacacatttttttagactcccgtcataataacttcagacaaacgttagtctgacctgataaatatttaattttaaacgttcttgtctctctcacgaaaaccattgtgttgaatattcatcattgctgattgaatataattatactgtggtaaatctggtaatatctttatttctaattctgtatttaattcgaaatgcttagcgatgttttcaaatattgctaaatactcgcccattaattgttcatttattgtaagtctatcttcattagccatggctctatttaacataaagctaatttcttctaatgcgaataagctaggataataattttgaatcaatgtcttatcactaaataattcaccattagctgcattataaacttgcgtcatgttatttaatttcacagataggttcatagccgtgtttttctgatacacatcatctttatattgattttcagaaaataaataatgaaagagcgttgcttctttacgaacaacttcagccattacattaggaagcaatgcggatgcggtacgttgtccaaggacaaataaacctatgattgcaatcacaatacccattgcaacgtcaataactcttggaaacgcaatgttaattgttaaattctgtgatgctaatccgttcattaaaataacttgtattgtaataaaaactactgcaatcgcataatttgctcccaccaatgcttcagtaaacaatgctgcaatgcccattaaaattactgcaacaggtgttggtattgaaaacaacaatatgactgaaagtactaacacacctaaaatagtacctaaacctcgtgccatacctctctcgattgcatgtatagttgatgttcctagtaatattgtatgtgcagataacggtatccagtatgctttttcaaaatcaaacattaacgcaataaatatcgctatcatcataatcgctgtatatctcaatgtatttctaaaaacaatagagtctaatgttaaattttgataaatgcgtttactatataaaggttttcgcatgtctgcttcatacgcaatacgcgcttcatttgcatgcaccatttcatcaattttcaatatatggttgaataaattttgaaattcctctgttactgtcacttcttttcgccaatatcttacattttcctcactattatctagttgtgcaatgatatgatccatcatttcaattaactcatctggcaatggtcgaatttgtttagcgttcaactctaacagttcagaataaatcccttgggcagatgtgtgtaataataataatttttggaaacgtctacttaatttatcgttacttgaagtagaagtgattaataatttatcagatgctttaaaactatccaccgctgtttttgctacttgtaaaaaagcagatttatcattataagtgtgtaacaacttagatatgagtttaaaatcattttgaattgcttgttcttcagctttgtttttagaaaatacgatcgtgattaacaccatcatagtggcaagtataccgcctactaaaatcgcaaagcctctatataatgcttcttcgggagctataggtaagttaatgggtagactgaatgtcacaatgaagaatgtcgatgacggtccagctatttttaaggcagtaaatatataaaatggtataaccgtaacaattaataatgtcattccaaaaacgagtggcgttttggctgttagcgtaccaagcatcatacatattgcaaacgctaaattacaaattattacagttcgcagcttagatcgcgacggacctttaaaaacataaatatgggctagtgttccggttgcaactaataatccaaattggaaattaccacataagtaaccgattattgcaggaataatcattaacagtccctgtcttacacctttataaaagtctaagttaagtcgattgatttttatgagtgatgtcaaaaagatgtcatttcgacttctcctttccttgtcaaaatatttccataatctttttattagcatagttaaaatgaatttgttgctataaattttaattacgcaacatatgtcattataacaccttatgctcaattatctaaatttaaaaacttttaaagtccaattaaaattaatttctaatgttatttaacatcgttgaacctttggtcgcccacctttgcgctagttaaaatttatatgtacttttacaagcgttacctgactaatgttttaaaaccttatttctttacatatatcatttcaataacttcattttcatcttaaaccatatctgttttaaaaagtttcaatttcaacgcaaaaaaagcaataagccccaactatgtgaaagcttactgcttgtttaaattatttttctattgctttatcatcactaacaattaaaggttgatctggtttcacatagaaccacataatcacagcgattactgctggaacgattaacaattggaatgtcattgtccaacccaaatgttctacgaatagacctgctaatagcggactgattaatgcacctatattaccccataagttcatccaccctgatactgtaccagagaagttacgtcctaagtcagttgctgcagcccaactcatacccattgaaataccgataccaccaagacctagtgataaccagaaaatacttacatataaatttcctgtgcgtacagcaaagataattgaaactgcaaacacaataaatcctgcaattgcaattacacctctagctacgaattttgaacgacctaatcctaatacacggtcagaaattgcacctgctgataagattaagaagaacattaataaccaaggtaatgaactaatgctcatttctttaaagttaacgtggaatacttctgttaaatacgtcggtaaccaaattaagaataatgtaatgataaattgtacaacaaagtattgaattgcaattgcatagaagctaaaacgtttaaagaaatcattccatggtggtgatgacttttcagtagctacgatatcacgattttccataatgaaacgtttctccgcttcattaaccattctatgttgctcaggtaagtctttggcaataatcgcccataatacagccattaaaatacctactgcaccaaaaatgtaaaatactgcttgccagttaaatgcgttaacaatagcaattgtaactattggtgctaatacaggtccgaaatatgatcctgctaataatgcacttgatgctctacctttttcatttttagagaaccaaaatgaattaaacacagcattagaagggtacattggcgcctcacctacaccaaataagaatctcactaaataaattaaaccgtggttcttaatcatacccgttaagattgtaaatgcactccaccaaactaatgcaattgtaatcatcttacgtggaccgaatttttcagccaacatccccgatggtacttgcattaatgcataacctagagagaagaatgatgccaataaaccaaattgtggttttgtcatccctaaatcatccatcatttgcttagcgatatatgaaatgtttgctctatccatatacgcaataaccccaataaagaagaacgcaagcgcgaacatccaccttacgttagttcgtttttccttcataactattcctacttccctaattaattttttaaaacttaccctgaaacgttaaaattttcggacatctggcatgtccacccctactttgtcacaaaattgtaccaaagttattttttataatattatcagacatggaaagcgtttacaatagaatctataaaaattttattaaattccgcttaacttttgctattaaaacgatataaaggtacttttagttacatagtagcctatcgtttgttaattaaaaatactgcaatcctagtgttttaaaacgtatattgcaggctttcttacatattcgacattcattttaaattgcatataactacattaaccattcattgtgcagcgcctgttgtttagatgatcatttattgactttttgctcttatagcaagcaattttttgatttattgcttataatacattttaagacaaatgtttgtttcaacatcgcatgcgacatcattaattattcatttgaatttatccagtttctatttgtctgcaattgctgaaaattaaaggagcttatttttaataatggaacaaattatcactgaatttattagccgttttgggtatgcagccatttttatattaattttattagaaaatgtactacctatcgtaccatcggaaattattctgacatttgctggtcttatgtctgttaaatcacatttatcaattttaactttatttattattgcaactatcgcatcgtttatagggctgttaattttatattatatctgccgtttgatttcagaagaacgtctatatcgttttattgatcgacacggtaagtggattaaattgaaaagtaaggatttaaagcgagcaaatgattggtttaaaaagtatggcgtatgggctgtatttatctgtcgtttcatacctgtattacgtgtattgattaccattccagctggtgtaaaccgcatgaatgttgtgacatttaccgttatttcattaataggtactacaatctggaatttcggtttaattttactaggacgcactttgagcgatagctttggtatgttgatgactggtcttcatacatattcacgtattatgtatgttgtcatcattatcgcagtcatttactttgctatacgttacattggcaaacgtaagagagtaaaataatattgttgttagcataaaggcatgaattttaaatttctataaacaaaaagcagtgaatcattccatctattgaaatgattcactgcttttttaagtttatttggcatactttagctgaaagtcaactatctttatataaagaaatattactattaacatgatagttatagttgtgaagtaaaaggctaccaacggctgagaaatgataccaattaataatgcaccgacagtcattccaatatatctcacaaaattaaatacacctagcactttcccttttatatgttcaaaccttttagaaattatagtagacagcaaagctggcacaataccaacacaagtacctaatataaatataattactgataatataattacatttgattcgtttaaccatccaaacaataacgtaaatatagcaaatccagttatagtaacacgaagtatcattatttcattatatttttttgaaaatcgcttataaaataaacttcctaatataacactaacagtaataggtaaaaacaaaactcctgatattccaacgcctatatcataggtattatttaataatgttggtaaataaactaatattgaaaagtacgtaaaaaatattaaaaatcccaatgtcactaaagtaataaacactttatcggtcaaatatttttcttcaattttttcagttaattttacaatccctttttcaacatttggaatatcaataaaaaagataatcaaaaataatacgatagatataacgagcaaaaaactaaaaataccaatataatcccatcttgcacctaaagtactccctaagattggtgccaaagctggtgcacatgataaaaatatttgatagttcgccatagcttgagctctaccattatctgtacttagtttggctaataaagttaaagtcacgagaggaataattccgcaaccaattgcttgaaataaccttgatatagcaaataatataaagttatgtgtcactgcacaaataaagctagatatgattactattcccaatcccgttaaaagtacttttttcgaatcacgagaatctatacttctaccaagtacaatttgcataactgcaacgataaatataaaaccgccaactgtcgcatttatccaaaatagtggtacttgaaaatcgtcatatagtctcggaataataggcgtgtatatgttttgaatcaatgatgcgaaaaatgctaaaaatcctagaatatataatctgatattactattaatcatttaaaccatcttctttttttaattcttctatactacggtttaaaaactctataataactgccatttcatcatcatcaaagactttaagtacctcttcatatttttttaccgatttttcatgtaattcatcatgtatataagataatttttttcctttttgtgttaatgaataattaacttctcttttgttaaattcattgtgcgattcaactactaagtctttcgctaaaagtttttttatcgatttagtaattgctggttttgatacatttaacatttcagacaaaaatttattattcactttatcattattatcaatcaactctatgatatgaaattgtgttagagataaatctagttcctcattttcctttttatactgtcttcttttatcggcattttctctttctataataaattgttgtaattttaaaataacttctctcttcatatccactattattcctcctcttcattagttaaccggttaactatattattgttgtcactcccatttttgtcaaatattgttgtaattaacatatatttacttagttatgcaccatttattccgcatttcacaaatccacctataatacaaactatcattttaaataagcagaatttaccctgtcttccacacaaattgttttcgacactttaatgtgcctactatccaaaaaagttactcataacaaattgcgcattttaataaatgtagcaatgccatttgcatgctgcaaaaatactcgtattcatatttatgttttatattattaaagttttttaaatccatatttttataacacttgctatgtgataaaattaattttatatataaaatcttaagattcagattatttaatagcaaaggagatagtgatatggatgttttaacaatagaacatttaacaaagaagataggcaacaaaacgattctcgaagatgtatcatttaagctgaaacgcggacaaatagttggtctcgttggagcgaatggtgcaggtaaaacaactttaatgaaagttatattaggttactctagtttccaaagcgggaattttaatgttattaacagcaaggacagcaaaagcaatatcggcgcattgattgaaaatccaggaatatatccttttatgtctggatatgaaaacttgaagttattgaatgaatcaaaaaacactcaagatatcgataaaattgtctcacaacttcatatggatgaatacattcataaaaaagctaaaacgtattctcttggtatgaaacaaaaattaggaattgctatagcatttttaaataaacctcaattcattatcttagatgaaccaatgaatggcttagatccaaaagctgtgcgagatgtacgtgaattgattgtccaaaaagcgcaagaaggtgttactttcttaatttcgagtcatattttaagtgaattagttaaaatcacaaactctatccttattattaacaaaggtaaaattgttacagaaacatcggaagaagaacttaaacaatttaaagataatgatttagaaaatgtattactagaaatcatagaaagggaggaccaagcataaaatgggaactttaattaaacaagaatgtttcaaattatttaaaaagaaatcaacttttatcgcacctattgtctttattctactaatggttgctcaaggttatattgctacaaaatacaatgaaatttttacgccacaggaatctttcacatctgcttataatggtttttcatggtttgcatttttattaattattcaagcaagtacaatcatttcaatggaatttcattacggtacgattaaaaatttactctatcgtgaatattcaagaacaactatgattgttagcaaaatcatcacattatttattatttctttaatttattttgttattacaattattgcttcaattgttattgggtctttattctttaatgatttaaatatatttgaaagtagcggtaatcaattatctttattgaatcaattattattagttagtttaggcacatttgttggcgtttggttagttttaagcttaacgttgctattatcatctgcaacaaattcaacgggagtagccattgctgtaggtattgttttttattttgcaagttctattttagcagttattcaaacggcacttttagaaaaaatagactggctaaagtggaatcctattaatatgatgaatattatgcttcaaacagttgaaaaaggctttagtaagtcgacaaaattagaacttcatgaattgtttattggtaatattgcttatatttctattttcttaatacttgtagtatttattttcaagaagaaaaatatttagtaacttaaagtattaaatgtctaaatacacacatattccatcgtaattcaaaatcattttcaaatcccttcacccaaataatggtgcggggattttttcatccaaattttggaaattccacattttacatatcgtaattttttaggaaactagtgaatataacaaatccctcctctcatttttaaaatagatatatcacttccccacttttacttaactaaactgcaacggttcctaataccaaaatcctgccctctatttttatcaattcaagcatacttattgaaaaatgttaacgttttcttgataatcattgtaagcgcatttattttataaactaacgtttgaaatatactacaggagtgacacgtaatgactcaaattactgaaaaagaattaaaaaagaagtatttagatttactatcccaaaattttgatactccagaaaaacttgcaactgaaattatcaatttagaatcaattttagaattacctaaaggtacggaacatttcgtcagcgatttacatggtgaatatgaagctttccaacacgtattacgcaacggttctgggaacgtgcgagcgaaaatcaatgatattttcaaagagagactttcaactaaggagcttaatgacttaactgctcttgtctactatccagaagacaaattaaaattgattaaaagtgatttccaaaattgcggtcaacttaatgtctggtatatcacaacaatcgaacatttaattgagttaattaaatattgttcttcaaaatatacgcgttcaaaactgcgtaaagcattgccaaaacaatacgtttatattattgaggaactactgtataaaagtaatgaatatcaaaataaaaaatcatattacgaaacacttgttaaccaagtaattgaacttaaacaggcagatgatttaattattggactcgcttattccgtacaacgcttagtcgtcgatcatttacacgttgtcggtgatatttatgatcgtggaccacaaccagataaaattatggatacactgattaattatcattccctagatattcaatggggtaatcatgatgtgctttgggttggagcctatgctgggtcaaaagtatgcttagcaaacttacttcgaatttgtgcacgttatgataatttagatattatcgaagacgcttatggcattaatttaagaccactgcttactttagctgaaaaatactatgacgcagataatcctgcttttaagcctaaaaaaagacctgacaaacacgaacgtttaactcaacgtgaagaaagtcaaattactaaaattcatcaagctattgcgatgattcaattcaagttagaaataccaattattaaacgtcgtccaaatttcgaaatggaagaacgtcttgtgcttgaaaaggttaattatgatacaaatgaaattacagtttatggtaatacatacccattgaaagacacatgtttccaaactgtcaatcgtgataatccagcagaattactacctgaagaagaagaagtcatgaataaactattattgtcattccaacaatctgaaaaattacgtcgtcatatgtctttcttgatgcgtaaaggctctctttacttaccatataatggcaatttactcattcatggttgtattccagttgatgaaaatggtgagatggaatcatttgaaattgatggtcatacttacagcggccaagaattattagatgtgtttgagtatcatgtccgtaaatcatttgatgaaaaagaaaatactgatgacttatcgacggatttagtttggtatttatggactgggaaatattcgtcactatttggtaaacgtgccatgactacgtttgagcgatactttattgcagataaagcttctcataaagaagaaaagaatccgtactatcatcttcgtgaagatgtgaatatggttcgtaaaatgctcagtgatttcggattaaatccagatgaaggacgcattattaatggtcacacaccagtgaaagaaatcaatggcgaagatcctatcaaggctgatggaaagatgcttgtcattgatggtggcttttcaaaagcttatcagtcaacaactggcattgcaggctatacactattgtataattcattcggtatgcaactcgttgcacaccaacaatttaacgctaaagaaaaaatactttccgaaggtatcgatgaactttctataaagcgcgtcgtagataaagaattacaacgtaagaagattcgtgataccaatattggtaaagatcttcaagctcaaatagatattttgaaaatgttaatgcatgatcgttacttagactaaagacgacatttgatgcatgtatcgtgcacttatttagtggtactgtgtttacgcattggctacgcaaacacgatgataaataggcgacctagctacaccgaaaaaaatcccctcactattgcgagtagtgaggggattggtgtatctatgctaattcctgttaactgtattataacaactttacagcaaaaaaatgcaaaatcaactaataaattaatgaaatgaccgacaccctcgcttctactccaatttaacaaaatactatattagtactatatttttcattaacatgtatgttacattttctatattacttaaaattacgaagggacatttttaaatcatgcgtatcttaaaagagtccattattgtggcatttgcctttgttggtgttgtcgttggtgccggctttgctactggtcaagaaattttccagtttttcacaagtcatggcgcatatagcatttcaggcattattgtaacaggactattgattactttaggtggaatggttgtcatgcatacaggtcatcatctaaagtccagaaatcattctgattcaattaactatttcttatacccctctattgcaagaggttttgatattattttaacaatgtttatgttgtctttagctattattatgactgcaggtggtgcgtcaaccattcatcaaagtttcaacttaccgtattggctgagcgcactcatattagtcgcctttattttagcaacactgtttctaaaattcgatcgtttaattgctgtgcttggcggtgttaccccatttttaattgcgattgtcattatgattgcggtctactatttcacaacaagtcatcttgattttactgccgctaataatgatgctcagattcataagcagaaatcattatcacctggatggtggtttgatgcgattaactatgcaagcttgcaaattgctgctgccttcagcttcttatcagtgatgggtagtaaagttaaatatcgtgactcaacgttatacgggggcttgattggcggtttaatcattacatttttactcatgatgattaatctaggtttaatttctcaattcgataaaattaaacacgtagatctacctacattaaaattagcgacacaaatgtctccgtcaattggtattattatgtctgtcattatgatacttgtcatctacaatactgttgttggattaatgtatgcatttgcgtcacgtttcagcgttccattcagcagacgttacttcatcattattattacaatggctgtcatcacttatattagtacatttatcggtttcatttcattaattggaaaagtattccctattatgggattgttcggtttcatcttactcatacctgtactctataaaggtttaattaagcgtattaccggcaaatctcatatcgattaaaatatctatactattgtaaaatttagtacagcacttcaaaatcaaaaaagcgggcagatgaaaagtaaaaatcttttccatctgtccgcttcttaatagaactgttatttcccaagtatttgttgaccagccgttaatccagtttctgtaatttcatggcccttcacccaaacttcttcgacttgtgccccacgtgtattaaacaagttaatgacttgttcacttgcagctaatggcacaattggatcatgtttccccatagaaagcaacacactgacatctgataaatcctttgttgacgttacttcaactgggtataacggtgcatataacaatgcttttttaaatggtgcttctgaacgcaacattaagttaatcgctatatttgatccatttgaaaatccaacaagtactgctttttcaatatcaaaatcataacgttcagcagcttctttaatgaacgtcaacaattcttgtccacgaaatgccaaatcttcttcatcataaacaccttcaccaagacgtttgaaataacggttcatcccattttctgaaacttgtcctctaatacttaacaagtgataattttcattcaatgcttcgcctaacggtaataaatcgaactcatcaccacctgtaccatgcaataatattagtgttggcgcaccattttgtccttctctaaaaatatgttccatcacaaatcctcctcattccaattaaccatgttgacgcttcgtattaaaaggtctaacttccgattcaatatattctcttttattttctaaaaatggtggtaaggataacccttcgcctaatgtttcataaggttcatcttccataaatcctggtccatctgttgaaatttctattaaaatatgccccacacgtgcatataatgcttcaaaatagaaacgattaacgatgcctgagttattaatacctacctctttatatttcgttgcccacgcttctattgcatcatgatctttcacacgaaatgacacatgatgtacctcaccataaccttgacgtgctgctggccctttatcatcttttattaagattacctggccaccattgcctccttcgccaacttcaagtaatgcgacattatcttcatgcgcaatagttgtcataccgtaaacagtctctaaaatatttttaaagtcgtcaaaataacttactttaatttcaatggggcctaatccataaatcgctttatctactggaaccggtccattcttccaaggtacaccaggtgctaccccttcatttaactcatctgaaattaattgatacacttggccatcgacttcttcaaatggcaacacttttttaccaaataattcttgaataccttcgtgtttaacaccaaactcatcaaagcgctgttcataatatgttaatgcgtcatcgttaggcactctaaaagacggtcttgtaatggaatttgttcctgcctgcccttttgtaatatttggaaaatcaaagaacgtcatgtctgtacctgccgaacctacatcatctgcaaaaaaagtatgatacgtataaatatcatcttgattgactgtctttttaactaaacgcatgcctagtacttctgtaaaaaatttataattacgttctgcatcatctgtcattgcagtaacatggtgaatacctagtaattcatgattatttatcattttatataccctctttatatttttagtgcatttatctcgaaatcgagatactttaatgtaaatttttagtgcacgccttacacttctgtagattgtgcacttagtttcttaaacgcttgttgtaagattgttaattcatcctttgttaacacatcaaacgcttttgttaatgtctcagcatgcttagggaaaatatctgccatttgactttgacctttttcagttaaacaagccatatatacacgtttatcatctttatccttttcacgtgtaatccaacctttgtcctctaattgacttacaacatatgaaatgctgctacttgcaattaatacgcggtctctaatacgttgaattggttgcggacctttattataaagcaactcgagcactgcaaattcagtaatatttaagccatatcgctttacgtcttcttttgtaatttgctctaatgtgtctaacgccctattcattccgacaaaaacattgagagattgtttcgttcgatccatatgatcaccaacttttttattttatttcgatttcgagataaattatatagctgaatagatttaatgtcaagatacgtgttttcatcttcatttcaaactgtgcttaataaaaacgactacatagatgtggcaatgtcgtcacatgactgtcatgcacctttgacttcgtttaagttaaaatagaatagggaaatactataatcaatcatgataggagttgatatgtatgagtaaccttgaaatcaaacaaggcgagaacaaattctatattggtgatgatgaaaataatgctttagctgaaatcacataccgttttgtggataataatgaaattaacattgatcatacaggcgtatctgatgaacttggtggtcaaggtgttggcaaaaaactacttaaagcagttgttgaacacgctcgagaaaataatttgaaaattattgcctcatgttcatttgccaaacatatgttagaaaaagaagattcatatcaagatgtatatcttggttaaataaattttgcgatggtgcaactgtaccatcgcttttttgttcgcatcaatataaaattgcaaaacgactagttattttgcatttcaaactttatgctatcaattcattttcttttctggtatactttttatactaacttatagaaaaatagaaaaagaggcgatgcataatggcatttcacgataaaacagcaacacaagtgacaaacattgtactgaacgtaagagacttagacttaatgacaacattttacaaaaacattttaggactatccgttaaaagttctgacgataatacaaccgtattatctgttgggactggtggccatactctaacgttacatttattagaagacggccgtcagacttccccacgtgaagcagggctttttcatatagcatttttattaccaactactgaggatctagctaacttcttatatttcgtggcacaaaaaaatatgggcatcggcgctggtgatcatttagtaagtgaagctttatatttcaacgaccccgaaggtaatggtattgaagtctatcgcgatagaccttcatcttcatgggaatggcaaaatggcaaagttaaaatggatactttagaagttgatagccaaaccttattaacacatcgtactgatgaaggttggcaaggaatgccagcaaaaggcatgattggacacttacatttaaaaacacatgatttagacgcagcatatcaatgttacattgaacaattaggattccaacatgtgtctgattttccacgtgcgctatttatgtcaacgaatcattatcaccatcatattgctgctaatacttggcaatccaatcaagcaagacaaaacaattcacaaagttatggattaacacatgttgatatttatcaacccgacgcctcaacacatacatttacggcaccagaagggtttgacatcacagttcattcaaatactgaccttgttccagaaaaataatcatccatactttattaatacaattttttcacgcaaaagcctgcgattcatttatgtaatcgcaggcttttttattgctaactttttaattttatatatttagacatacggtattctatttattcttttggtccaacccattcaataacatcttcataagcttggcgtgttttatttttcggtggctcttgttgtctgtagccaaatgcgaccatcactgataaaccaaattgctcagtatctaagatccctttatttgctaaaatgtctgtcactgtatccagactaaaaccttccatcggacatgaatcaatacctaacaatgcggctgtcgtcatcatattgcctaatgcaatatacgtttgtttacttgaccagtcatacaaggcttgatcattatcagaaatatggaaatctgcttggaatgcatcgaatttttgttcaacagctggaatcgtttgtgcctcatattttttaatatctcttaacatatgttgtacatacggtgatcttgacgttacatttttacgcgcaaaaattagcacaaaatggctcgctgtatctaattgttttgctgcgccccaactgtgcgcttttaattcatcacgtaacgcttgatcttgaatcacgacaaacttccaaggttctaacccaagagaacttggagacaatctacctgactctaatattgtttcaaaatcttctttcgaaactttcttttgtggatcgaattgcttagtcgcatgtctgaaatgaaatgcatccataattgtttgattcatattgctcattgaacatagcctcccatttttatatttattgctatacaaattatacttcatgttttaaaaagactaaagtaatccgtttgcaattcactataacttgtgcacatgttataagttttctgcaataaaacacacttttgaattttgggaaatttagtgttataatatatttgtgatatttttcacaattaaattgtggcgtgattttaatgtgcataatctttaatttcactcatttacttttcaatcttttaaaagcgaggtttttaataatgacaaaaattatgttctttggtacgcgtgattatgagaaagagatggcattaaattgggggaaaaagaataatgtcgaagtaactacttctaaagagctattatcaagtgctacagtcgatcaattaaaagattacgatggcgtaactacaatgcaatttggtaagttagaaaatgacgtttatcctaaattagaatcttacggtattaaacaaattgcacaacgtactgctggatttgatatgtatgatttagatttagctaaaaaacacaatattgtgatatctaacgttcctagttattcacctgaaacaattgcagagtattctgtttctatcgccctacaattagtgcgtcgcttcccagatattgaacgccgtgtacaagcacatgattttacttggcaagcagaaatcatgtctaaaccagttaaaaatatgactgttgcaattattggtacgggtcgtatcggtgctgctacagctaaaatatatgcaggatttggtgctacaattacagcttatgacgcctatcctaataaagatttagactttttaacttataaagatagtgttaaagaagctattaaagatgccgatattatttctttacatgttccagcgaacaaagaaagctatcatttattcgataaagcaatgtttgatcatgtgaaaaaaggtgcaatcttagttaacgcagcacgtggtgcagtcatcaatacacctgatttaatcgctgcagtgaacgatggtactttgttaggtgctgcgattgatacttatgaaaatgaagcagcatacttcacaaatgactggactaataaagacattgacgataaaacattattagagttaatcgaacatgaaagaattttagtaacaccacatattgctttcttctctgatgaagcagtacaaaaccttgttgaaggtggtttaaacgcagcattatctgtcattaacactggtacatgtgaaacacgtttaaattaatatatatatttaaaagcaaaggcgcgccatgtgcctttgctttttattttgtatatctgtatcaaaatcgatttgattaaaatccgctttattttatcatctattcaaatgattttagtgcgcttattttactatggcattattgcctaacctgtttgagatatattaatatttgatgattcgtattcaaagttttcatttaacatgtatttagtatcatgatagctgcttcattgatgatatactacctactttttcaacacttcttgttcgataatcgttaatacaccctgcttatcattacttggagcgacagcagaggcaatattgaacaattcttcatcatgactattttccatcacataactatgcttagcgaacgctaacatatctttatcattattcgcatctccgaaggccatgagctctgaaggagacatttcccatttatctaacaatcgttttaatgcctgccctttagtcatgtttggcataataatatcaatgctatcgttcccacttgagacaagtttaatatcattgctgaattgcgttgctacttcttcgtcaacattcggatgcgtctcacgattaatattaaatgctattttgacataatcatcctcaggtaattgctgtagactgtcaatttcttttaactgatgataataaaatctcgtatcttctttaaacgcttcagaagtatgttttaaaatatacgcgcttttcaaaccacagatgacgagttgatcaatactttgcttcatatttaagtaatcgacaacctgttgaaacacctgacgattaaagcttttataattatataactcattgccattataaataactgcaccattttcagaaataaaatacatatctctatccccgaaaatagacttcaacttcgcatattgattgccactcgcagcaataaatgtaatatctctatttctaagttcagtaaaaatcgcttcaaatctaagtttatcatatgtcttttttgaatctaaaaacgtcccgtccatatctaccgcaatagccttaaccatgattatcctcctcattgctcttttagtcgtcttcattatatccatctcatgacaagcaatgaagtttgtcataccacaatgaacctatattcacattttgaaattgctttcatatatgcaaaacacattacactggatatagcattcagaggcgaacataaatttcagaatattgtaaaaatatcacactatatttatcatttagacaaaatatagtgtgatatactaatttataacatctatacataatgtgaaagaatttttaaaaatacaattaaatatcggtgtaataaatccctttatacataggagttgtatacatgaaactaaataactattctttaaaagttaaaaacaaacaactagttgacaattgtgatttaaatttctatcttggtcagatcaatcacattgttggtaaaaatggtgtaggaaaatctttattagctaaagatttcttactaaataatagtggaaatatccctaagtccatttctcaaaatgtaaccttaatatcaagttcatcaaatattcctaatgatataacaaaagattttttattatcattgttaaaatcaaaatttgaaaacaatcgacaaacattcgataagatttataacatactaaacatcgaagcaataccgtctaacgtactactaaaaaacttgagtgatggtcaaaaacaaaagcttaaattattaagtttcttattggaagatcatgatttaatcatattagatgaagttacaaacgctttagacaagaaaacagttaatgaaatttatgaatttttaaatgattttattcaaagccatcaaactaaaactattatcaatattacacataatttatccgatttaagtgctttgccgggtaaatactttatttttaaagaccttcaaatagaagagtaccaatcaaaagaagaagtcataaatgattacattaatttataattgaggtgtccactttgaaattagaatttaaaaaaagtatttccaataaaattatttacacgcttgttgtgctattcacattccttttcttacttgggtattttttaccaataggtatagacaaagttaaaagtttaagctatagccagtttttcttcagttcatatactgttgcaacgcaattagggttcttactattttcatttgttattgcatattttattaataaagagtattcgaataaaaatatcctgttttataaattgattggcgataatatctttaccttcttctataaaaaggtagcagtgttattttttgaatgtttagtgttcataattctaagtatcactattatttcaattatatattcggatttctcacattacttactattaataatcttattttcactcgttatcttacaatatatcttagttgttggaacgattagtatggtttcacctaacattttaatcagcttaggtatcagcattgtatattggattggttcagtcatcttagttgccattaataaaaatatatttggtatcgttgctccatttgaggcgagcaatacgatgtatcgtgccgtagaaaaaatattgaataacgagtcaacatttatgtgtcctactgaaattataaatatagtatcattcttcgttcttctatttatagttaatactattgtcttattactaagtagaaagagatggttgaaaatcggtatgtagtataaaaaaggagcggtatacattgccgcttctttttattatgtatttttacaatctccaccaatgacacgtcgtcattgctacctcataccaaacaaaaaacagtctcgcaatcaagactgttttccactcaatatattcatccattagcgtaatagattatttgacttctgtagctacaaagattttacgtttttcccaaacgcctgtcttttcattgtaatcatcacaagtaattaatgttaattgtttatctttacctttttgttcatctagaactcctacatctgtaggcttaacatctcttatacttgtcattttatacttacgtgtttcattaccaactttaaagtacaccatactaccttttttggctgctttaagatttgtaaattgatagttcggacggtcaatgaaagtgtgtcctgcaattgaaatattttgatcatctagtgattcattttcttctgcaaagcttacacctctatttaattgttcaggtgttgctggtcctggatatactggttctttaatatcagcatctggaatttcaatatagcctgccactttcgatttatctttcggaatttgaggtttagcttgctgctttttatctttactcgcctgttcttttacatttttatcatattgttcaatcttttcatctttatctttatcgtgaagataattatcgatatgtggtttagcaaacaaatatgctgccactaggataagtaccacaccagcgattgtcattaatcgatttgtccattttttcatacgttaaggctccttttatacatttcacaatgcctgttaacatttcatatagtataccattaatttcaaaatgactcatagcaattcattttatactataaaatttacatgtatacttttacgttagatttcattacacatatttgcattcaaataacgaaacgcttttaataattactaagggggaattgatatgattagatacgctaaaaaagaggatttaaacgctatattagcgatatacaatgatgccattatcaatactacagctgtttatacttatgaaccacaaaccatagacgaacgtgtcgcatggtttgaaacgaaacaacgtaagcatgagcctatctttgtatttgaggaaaatggaagtgtcttagggtttgcgacgttcggttcatttagaccttggccagcatacctatatacaatcgaacattctatttatgtcgatgcttcagctagaggaaaaggtattgctagtcaattactacaccatttaattgtggaagcaaaagctaaaggttatcgtgcgctagttgcaggcattgatgcttccaacaaagcgagtattcagttgcatcaaaagtttgcttttaagcatgccggcacactgaccaatgtaggttttaaatttaatagatggttagatttagcattttacgaattagatttacaagactagtaatgtttgaatcacataatataaacaagacaaccatgttaattcccttaacataacaagccaacatataaaattttaaacttctcaggggagtgggacagaaatgataaagagccactaatgatttattatgtagtggttcttacacattagccacagctaatgtgtacttaaaaataggaatacatgagtaaaactcatgcataagaaatactaatttctatagaaaaagtatttctttatcgtcgtcccaccccaactcgcacattattgtaagctgacttttcgtcagcttctgtgttggggcccaaaaagcttgttacaagcgcattttcgttcagtcaactactgccaatataactttgtagagcatattacattgatttacattgtcccttttatttattcttttcaaatactatccccatagctttgatttaacgctttttctcaataacaaaacgaatatagtagaacatgaaaacgataatcatgctgagcgataaagatttaaataatagattgacccacgttccctcagtcgtatatccatatgtaatcgttgtgttaatgatgaatgctataaagatgattgatagtcttagcatatcatcactccttttaagttattttagatatacgggggcgcttttgcaatcactattttgattagtatgcattttccataaatctttcaacttcttcagagataattaagaagcatctatctggtactaatgatccagacagatgcttcttttttatcaatattttattgttatctcattaattatttttaaccatatcttcagctgtgccaaagattttacgtttaattgcttcgccagttggtgtgcctgctagtccacccaatccagtttcacgtaatgatgcaggaaggttacgaccaaccttatccattgcttcaataacttcatcaacagggattctactttcaatacctgctaatgctaaatctgctgaaattaaagcgttacccgaaccaattgcatttctcataacacaaggaatttcaacaagtccggctactggatcacaaactaaacctaataaattacttatcgctaatgccatagcgtgcccggatgcttctggtgatcctccgaatatagctactgctgcagctgcggccattgcagatgctgaaccaacttcagcttggcagccacctgttgcaccagctacacttgcattgtttgctacgacacgcccaaacaatgctgaagtgaataagaaatcaatcatttgctcttctgttaaatcatgtgttttttctaatttaaaaagtgcaccgggaatggtacccgaggaaccagctgttggcgttgcacaaataatacccatcgcagcattgacttcatttgttgcaatggcacctttgactgcgtcaatcatttcatatccagacaaagcatgatgtgtttcattataatcacgtagtttagcagcatcatgaccagtgtagcccgttacactttcaaccccatcacctgtcgtccctttgattactgcgtctcgcatgacatctaaattttgtttcatttgcgctcgcacttcatcacgtgatttaccgcttaattccatttcttctttaaccatgatatccgcaaatgacatattattttctacggcataatctatagtctctctaattgaatcaaacatgtttattccccctctaatttatataggaaacgtttacgtcactgtatttctctttaattgtatttaatgttgattctgagattgctttatttaatggtattacaaccaagcatttatcttcatctatcttaataaattcatctttacagtctaatttcatatcgttgatatcattgatgaaatgatttacttgtgctttagtcatatttccgtcaacaactaaaattggtaatccatgatttaaatctacttctagtccatttatatgaatacctttaattttaattgtaccaccaccgattgaaataccgataatttcaatgtagcgaccatcattacgagatgatttgatataagcacagtttggatgttgaccaatactatcgccttcttcttcgatgatatctattttaataccatcatcagctgcaatttctaatgaagatttaattcggttatcaaatgttgaatatcccattgctccacccacaatagcgacatctgtaccatgtccttggtgtgtttgagcaaatgattcataataatgtatttcaatatttttaggaatatctcccaatattgcgcgtgctgaattcccaatctttactgcaccagccgtatgagaacttgaagggcccatcataactggtccgataatatcgaaagcactttgataatcatagctctttgccataattaaacactctccttaatatgattctttttgctcggcattttaaagttgatattcattaaattaaacttattaattagtgttccaataatataggctaagacaatgctgacaataatcactgttgcgattgttacaattgatgtcactgcattattaaagccaaacaatacgatggcgcctgcaattggtgttgccatacctttgacacctattactagtccgctaaatgtcacgatacatgcgttgacgaccccaatcagtgcatttgtaccatatagttgtactggatattgcgctattaaatcaatttgcgtcaatggctcaatacaaactgcaaatgcttttgacggtccaccaatgtttaattttcggaataaaataaggttaacaaatgagctacctgtacatgttagtgctccaatagccataggaacacctgtcagtcctaataaacttgttaataccattgaacttagcggtgtcatacctgtaacaggaatcactagtcctaaaatgaccgctaatgcatatggattgttatcacctaccgcagtgacagcactacctatttgttttaatgttgctagcacaccaggtgtaatgattgatgcaagtccgaaagcaattgctggtgcaaataagatcaccacaattaagtccaagccttctggaactttcttttcaatccatttaattaaaaaagctacgccataagctgcgatgaatgctggtaataatttaaagtcatgtaatactaaaccaacaatgaccgcaaatactggtgcaacgcctaagtttaagcacgttagaatacctactgcgataccgcttaaacttcctgctaaatccccaatatcttgtagaaatttaatatcaaatacgccaccaatagcataacttaagaatgcttgtggtagaaatgtcgcacaagctgcaccggataatgcttgtagtccttgtttaccgtacggtgcatactttaaaaatagcgtcatgatcactaaaaccaagactaatgtgcctacacctaacagaatatccatttcccaaaaacctctctctatgtttattttattttcagaccataaacatcgtacacccttaagaaaacgttttcaacttttatctgttatcaaatcaaatatttaagtgaaatatttgatatttgtgaaagatttttaaaatggattgtttcaaaaactacttatgttgtcgttaatatttactaattaactttttactctatatttcaaacagttgtgtgacagttttttgataacttttttacatctgaaagtaagtaatatttctaaaaacttttaatatttatacactttatctttcgagctatttattttttgtttttgtgctgtgtttataaaaccgcacactatattcaaaaataacttattacacatatatttgcaataagataattaaagtaggatattatttttagttttctgataggaatgatgatagtctataggttgaatctttacttttttttaaagctaaatttacatcaacttaacaatggttggttatactgaagatgaaaatatttagtataacttagtggaggcgataaaggtgcaattgagtcattccgttaaagttgcaatttctatctatttagcacttatctttataacgttcacttcttatttagtcattattttatatacgagtatgactggacatgatgtatcacatttcgtgttagatagtcagcattctcatcatggatctcttacgcaaaaacatttgagtcttcctgaaatctcatttaaatagtttatcctctgtgtttcaacattcatttcccatatcgattcatttatctatcatctagaccactacatcttagatgatttttttattttctcatttcactctttcttaaaagtcgatataatgaattaaatcattatcatacaccgacatattttatgttgttggtgttaagttttaaaggggtgagatacttggcgaataatcattcagctttgcgtttaaaaggaattatacttgccattgtcggtgcttgtttatggggattaggtggtactgtttctgatttcttgttcaaatataagaatattaatgtcgattggtacgtcactgctcgacttgtagtcagtggtgttttcttacttattatgtacaaaatgatgcaacccaaacgttcaatatttagcgtattccaagatcgacgtatgttaggcaaattacttatcttcagtatactgggcatgttagtagtacaatatgcttatatggcatctattaatacaggtaatgctgcgattgcaacattactacaatacattgcgccagtttatattattatttggtttgtcataagaggcgttgcaaaactaacattatttgatgtgcttgctattatcatgacactattaggaacatttttattattaacaaatggttcattttctaatttagtcgtcaatcctgcaagtttattctggggtattttagctggtgtagcactcgctttttacacaatttatccttcagacctacttaaccgcttcggttcgattctaattgtcgggtgggcaatgcttatttctggtgttgcgatgaatttacgccatccaatttggcacattgatatcactaaatgggacatatcaattatattatttttaatctttggtattatcggtggtaccgcactcgcattttatttctttatcgacagtttacaatacatatcagcgaaagaaacaacattattcggaactgttgaacctgtcgtagccgttatcgcaagcagtctatggttacatgtggcattcaaaccatttcaaatcgtaggcatcattcttattatgattttaattttattactatcacttaaaagacaacctgaaacattagatgaataagaaaactctgataatcactttagcaagtaactattatttaacaacgtagttaccttataggtgatatcagagttttttattttagttaataatatttttcacttggtataaaaagcgtcgtcgctctggtatcggaaatactggataaatatggaattggtaatatccaggtataaagtcatgttcgatacctttcgcactcaacaattgcgataagttcaaagcatctgggtacagtacttcttttgtaccaacagttaatgtaatacgacctaaaccatctaagtcaccattaattggtgatactttgtagttatctaaaggtgtgtcccctgcccattgttcagctaagaacacactgccatccacacctaccattgggtctttctttaagtagtcaggaatttcaggatgctgcatcgttgcatctaaaactggtgaaattaatacaatatgtcctggttgcacaatatgtttttcttttaacaattgagcaaatgataaagcaatttgaccgcccgcagagtcacccattacaacgatttgtttagaatctgctacttgattcaataaatcatggtacaacttttcaaaaagcacatacgtcgcttgataatcttgatgcggaatcttcggatatactggcatgatgactttagcattgagtgtttctgcaagttcatcaataaattcgaaatgaattttgagtgggtcttggaaccatgcgcctccatgtgcatataatacaacgcgttgatgcttatcttgtttatcgttaacggtataaacggttgaaccgaagtgcttatccacttttactggcatcttaaactgataattggttccctcatattcgcctgctgtctgtggcgccattttttctaatgctttcatcgcttcttctttatacataaaacgacgcttagctctagataatcgtataccttgttctaacatataacttttcacactgcgtttttctttaattctaatatgtgcgtatgctgcaactaaaaatccaaacgcaagtgtagaccattttttacgcatttgtcgtcactcctctttgatgatttctactatagttctactgtaccatgctgattctaattactaccaatatttactgggaaataagttatgatgtctacataatcttagcaatgctaatcatttgcgatattaatgctcatcgacatcgttatttacactatcattcatttgcttaagatgatgttcaaaacgttgcatatcgataaaacgcccttgacgatgcatttcttttccattcataaaaattaaatccacaggtacagtgaaaatatttaattctccagcaatagcttccacctgactttgattaatcacagctaatggcacattgggatatgattgcatcaagtcttcaatttgtggtaaaacggcatgacacacgctacactgatcgcgcatgacatgtacaactgctaacggatattgatgaataaattcacggaatgcttcgacactatttaattgcttaaccatttcgaacaccttcttactttttatattttaaaatgaagtcattattttgttgctaaaatgtcttgaaacacttgtggcacagaggttatcttcttatcactcaatctgtaaaaaccgcctgtctgtgtaccaatacaatgcacgccatgtgcggacacaatttcaaactgaaacacccatttcatcttgcttgctttaactaagtaaatacgacctactggtttgtcatgtattgtgacaggtactttatactctgcttccgttttcataagtataggtgaaatgccttgattgatcattgttgagtaattcatgtgctgattaataaacgctgttctcaaatcttcgaaccatctaatataaacgatattactaacgacacccatcgcatcaatgtcgtaaccattcacttcgatttctttctctgcaactaatagaccttctgttgtcataatgacaaatctccttatcttacaaatagatttaaaatcatgttaatttatttttattactttcatgataaaaatacaagcaattgaactttattacggaaaatcaaacttttcaatgagactattaatttggctagtcgcgaagatgcatttttctaaaatgtgacaaaaacataagcaatgttttctatatctaacactaatatttaacttattatcatcaacacacctgctatacatcattgcgcactaaaaaggcagtagcttcattttaagctactgccttttgtaacgtattctctttcaactcgctacttcgcatacgcactacgaatgactaaaagttcattcatttgatatgctgtttcatttttaatcattatttgactgtcataattagcttacctggatcagcatcttgtacatcttcaatgacaagttctttattttcaagatttgtaataatcattggtgtaacgatgcttggtgcgtgtgctttcaagtatgctaaattcactttcattaatggttgaccttgtgttactttttcatcaacgttaatcagactttcgaatccttcaccattcagtttcactgtatcgataccaatatgaataagtacttcgacgccactttcagattctaatcctatcgcatgtttcgtagggaagattgttttcactgtaccatcaaacggtgctacaatttcacctttttcagggataaagccaacaccatcacccatcattttaccagcgaacacttgatcaggtacttctgataatggaatgatttgaccgatacctggtgcatagatgtctgttgttccaagtgcttctacgtgaactggttcatctgacatttcttcagtcactgtcgtttcacttggtttcgtaatttcaccactcataatcttggccatatcatgtttaatttgatctgattttggaccaaagatagcttgcatattgtttccaacttctaatacacctgatgcgcctaaagctttaatacctgctacatctacttttgatttatcaaccacttctacgcgtagacgtgtaatacatgcatctaaatgtttaatgttttcttttccacccattgcatctaagacatcaaatggtaattttgcgacactagagttacgaatttcagtttcttcatcttcacgacctggtgttttcaatttaaacttacgaattgcaaagtcgaataagaagtaatacacgatagcatatacaataccgactggaataactaataatgcgtgtgaacgatcccagtttaataaaccatataaaatataatctatgaaaccacctgagaatgtcataccaattttaacgcctaataaatgcattactaagaatgatgtaccagctaataatacgtgaattccataaagtactggtgctacaaataagaatgaaaattctaatggctcagtgataccagttaaaaatgcagttaatcctgctgataacattaaaccacccacgacttttttacgttctggtcgtgcatttttataaatagcaaatgccgccgctggtaaaccaaacatcataaatggatatttaccagtagtaaatgcaccagcagtaaatggtacgccatctttcaattgtgccatccaaatacgttggtcaccacgaaccaattcacctgcgtgatttgtataacttccgaattcaaaccagaacggtgaatagaaaatatgatgtaaaccaaatggaattaatgagcgttcaataataccgaatataaacgttgttaatgttaaatttttatttaataagaaattcgataaactatttaatccatcttgaattggtggccacgcaaagcttaaaagcacacctgttgcgattgctacgaccgatgtcacaatcggtacaaatcgtttacctgcaaagaatcctaaaaatggtggtagtgtaatattataaaatttgttgtaacaccatgcggctaaagcacccatgataataccaccaaacacacccgtttgtaacgttggaatacctaatactaaagcatgtgctggttctttcgctgcttgacttaattcttttgcccctttggcatatgagaaaatgtcatcaattgtaatgtgcaacactttccccattgttgcattcataattaagtaacctactagcgctgctaatgctgcaacaccgtctcctcctgctaatccaagtgctgtaccaactgcaaataataatggcaagttatcaaatacaacttgtcctgctgcttccatgaccgacgaaatcattacaatgatatcgttttttaaccatggtgcaatttctactaattgttcgttgtgcattgcgttaccaaacgctaataaaataccagctgctggtaaaatcgcaacaggtaacattaatgctttaccgatacgttgcaattgtccaaacaatttcttaaacatataaacatcccctatctcaatttccgcttccatgtacaaaaaaagcaggcatgaacaaacaagactattctcatagtgcggttgtttgctcatgcctgcattaccagtaacacgcaagtgatatctaattcatagctattatacatatttgtaaaagcgttttcaacaactttttcacaattttatcatcaattcagtacgatcatttgtgataaataaacaaaacggcaattcccattttgttgaaatagaaattaccgtttttatagttcaattcaattgtgataacctttaaatcagttataagaaacgttttgctgccactgaaattggtggaatttgatctaaatctaaatgtttatcttcagtaattgatctaaatgcccacttaccataaccaagcgcttcttcatttacaattttacctggtaatggcgcagcattaggatcaacatatacatctacaatcgttggtacatcttgtgctaatgcctcttcgactatagcatctacttcgctagcactcttaattgtataacctttaccacctgctgcctcagcaaattttgcatgatccatatcagaaaaatcaactgcatattctaattcaccagctgcttgttgttcatatttaataaatgctaactgtttgttattaagtacaaatacagttaaaggtaaatcatattgtactgctgtagcgaagtcttgcattaccatttggaatgcaccgtcaccagcaattgcgatggcttgtctatttggatatgcaatttttgatgcaattgcacctggaagaccgcaacccattgtacctaaccaacttgaaatgatgaacttgttatttacaccaaggtttaagtatcgagttgaccaaactgttgctgtacctacatctgctgaaatcactgcatcatctttaataaatttattgattgatgccattaatcgttctggacgtaatggtttactattattatttttatcttgttccatccatttatcccaaaccgctttacgttctaacgttttgtttaagaatggtctttcagcaacatgtttaatattttcagttaactgatgcaacgcaattttactatctccaacaattcctacattaatattgaaacgatgtccgatatttttaggatttgtgtcaatttgaatggctttaatatttttcttaggtaagtaatccacatatggatagtttgtaccaaccataattaataaatccgcttcctgcattgtttgataagatgttttggtaccgattttacctaagttaccgatactatatggatgatcatccggcaagattgttttagctggtaatgaatgaatgacaggaattttagccatttcaataaattcacgtagctcatctttcgcatgtttcgcacctacaccaattaacatgacaggctttttacttttattaattagtttaaccgcttttttgatgtctttatattttggtgatactactgttggtcttgatgtatctactggtttattcgttgtatctttaattttttcagttaataagtcgttaggacaaataacaacagctacacctttttgttcatatgccgtacgaattgcttcgttaacgatttcaaacacattgtcacctttttcaatttggtgattataaacggctacatcttcacataatttttgtaaatttgtttcttggaatgctttcgttccaagtgctgtactattcgtttgtccagataatattaattgcggtacattatccattttggcatcatacataccatttaataaatgaattaaaccagggccaccgatacttaatgccacaccgattttaccagttaattttgtgtaaccagcagccgctaagcttgctacttcttcatgacgtacatgataaaatttaaattgatctctcactgtacgtaaactatcgactactgcgtcgattgagtctcctggaataccatacaagtgatctatatcccatgcttgtaatgctttaactaatgcttcatttgcttttatttttgccattattactaatagcctccctttctgtctatcattttaaatatctaaattaatagaataataaaattagaacaggtattaacactgaactaataactgcagttaaaatcatcccaattgaactaaatgcaccggattcaatatccatttctagtgctttagctgtgccaaatgcatgtgacgcattcccatacgttaatcctttggcgatagaagattcaaatcttccaaatcttaataacatcgaacctaaaatactaccgattaaacccgttgtgataataaaaagtacggtcatcgtatctgtaccacctagttcatgtgacacttcgatacctactgcggctgttatagatcggggcaataacgttacaatgacgtctttagaatagccaaatgctttaagtgttaagaacactaacatgaaattcagcatgacgccagttaatacacttgcaaaaatgatagagacattgtctttaattttctctctatttttataaagtgggtacgctaaacatacgaccgttgcgtttaaaatatggttgatccaactgccacctttcatatacccgttataactaattccaaagataagtaagacaaaaataattcctaaagatgcaattaatgctggattcaaaaatgggttcggatatttttgttgtaaccttttagcgaaataatataaaacgacagtcaacaaaatcattaataaggcttgcacgtaatcattcataagcgtctacacctttacgatgtttatgtttaacagacattttttcagcaatataacctgaagataatgcaacgatacatgttcctatgataatgactgcgaaaaagagtatataatttagcgtaatttcggaagcaacatccataatacctacaactgacggtatgaagaaaaagaccatcgtctttaataaaaagtttgcaccgtcttctacccaagttagcggtacaatcttaaattgtaatagtaaataaaataaaaatagaccaacaatactgccggctaagggaagatgaaaaatcttttgaatttctgtgccaatataagtaatcacaatgatgattcctagttgtagtagtagtttgattattaattggactttgtgcatggcgccatccctttctaaatatgtctaaattgttacaataactattataaagatggcgtacacaatataaaaatactctttttttatagtttgtattactattttctatggaaacgctctctaaatttcacttcattttcacaaaaaaacactcattatttcaatgacccacgtaatgatgcgccttaaataatgagtgctttattaatatgttagcctaaacggtctttcaaaaattctatccatttcgttgtggcatgacttaattgtttatccttcttccaaacaacacctaattcccaatgtacatgagcatcttcaatgcgtagcagcttcacatctccatttagttgctctgaaattgatgttggtaaaatactaatacctaattcattcgtaactaaatcttctataacatgccattgtgaaatttgcgctacagtattcggaacaaagccaacgtttttagcattttcaataattttatcattcaagtaaaagtctttattaaataaaatgaagtcttcacctgctaaatcttcgagtttaacagtttcatattttgcgagtcgatgctctctgctcacgataagtcgcaaatcttccttatctagggtagtataatcgaaaatatgatgatcgactggcaaagtggtcacgcctatatctacttcatcattgataatttgctgttcaattgttttaccgccattttctatcaaattatatgtaacatttggatattgttgatggaatgcaccaagaatattgataagaatcttcatattcatgactgccgacatgcccatgtttatatgtcctgtttccagtccattcaagcgttccatttcagatggtaaataatcatacagtgcaacaatttctttacttttctcataaaaaatttgacctgcatcggtaagaattaaatgtcttttacttctatcaaataagggcgtgcccatttcattttcaatatctttaattgctttactaattgtaggttgtgcaatatataatgatttggaagcattagtcatgcctccttgcttaacgacttcaataaaatatttcatatgtttgatatccactaacatcatcctaactatttcaacacgtttatttcattatacacaacttcttaaacattcaataaatttagatttataaaattgctttataaaaagttttatgtaaaatacacattcttttatggtattatattaatggctcaagtatattaatcgaggtgaggtattgagcttttacgaatttatgcaaagttttcttggtgatgacacaccattaggtgaattggttgattggattaatcaagatagcaatttccctagagaagtgaagagccatagtgaaatattgtcatattttcgaacaaatccatgtcctgaaagcatctcagtacctgtaattaaacgggcactatcagttttcaaccaattcacaaatgtacaatgatacatgaatacatggagtcacatcatctcatgttagcgctctgattgcagggcgctatttttaatgttattgctacatttagtatattgtgattgctattttctttcagttatagaaccatgtaccttttttttaaatcattttatattttcccactaatatccgctgttaatcaatcctgacatccttgtatcactatgacaattaattgttaaatacatgaatttctacattttatgaaaaaatccatttttattacaattcaacactttatatgacaacttcattacagttacttttattgttgattgcttacattgttttctaaaaaaaatttgttatcataattaacgttgaataaagaaaaaaattaacttgggagataaaaatggaatataaaaagatactaattcgtttattaattgcttttgcagtacttttctcagcagatttcacttatcaatccgtcgaacaaacgcatcaatcgcatgccgcagttaattattatagtaaaaaccaatgtacatggtgggcatttaaacgtcgcgcacaagtcggtaaacctgtttctaatagatggggcaatgctaaaaattggtattacaatgcacgtaaatcaaaatatgcgactggtcgtacaccaagaaaatttgctgtcatgcaatcaactgcaggatattatggacatgtcgcagttgttgaacaagtatataaaaacggtagtattaaagtttcagaatacaacttttatcgcccattaaaatacaatacacgtgtactaagcaaaaaggcagcacgtaactttaactatatttactaatcaaaaaacttctatcacgaacgcttcaatttcctgtatgcgtgtgatagaagtttttattttatgaaattatattattacttctacaaatttcaaattgccgtaattgaacgtatatttcttcttcaactattatttcatctttagcataatctatatataaaattttatgctattatttaaataattcgctataacttaacatacgttttcgatataaaccttgttctaaatctcaataattttttgctgttttcatcgtcattagttaaaaaaataatttaactgagtttttgagacctgtttaaattgatgactcaaaacctttatccccttttcactcggtttaattgctttaatatttaacacagtctcattgtaattttgctactaagtttgaaatatttcgattcgaatgtgaaacatcatttattattactttcgacagctagaaaaatattgttaaaccaaaactataattaccacttttatatagaactatatataaattttaactttgagacagaactgctagtcaggtttatgaatatatttctttagtttacttgatatacttattggtaaatcattatttatttgaagagcatttataacaaaaagtataatcccagttatagcgattccatgaccatttttatcagtcaaagattcatcaacaaaaactttttgataaatttatatatttgtataatttattatggtagatatctacacccgtatctataacagctacagttatcattgcgtcttatccaaatagtttttaagaaataaatataattcattaatatcatggctatttgtaacgtcagtgcttaagaccttgtcaattattgttttatctgtttctaagagcccctgattttctgcatacatattttgtatatcgctgttaatctcatttaattttttaaatttttttctaacctttttcaaaataaaatgctctttaattccatctcttaaatacatataaatctctattataatctccataaatgtcatatctcctctctcaaaaaacattatactcaatatattaaaaataagaaaggttttttcagaatttttagtattttcagatatttattcttaagtatcttattattacttctttttaacgctagtggaataattaataataattgtatttaaatgcaatgctgttgttctttcatacttacaagcaagtcataagaaatgagaaattaaattcttatatgatgaataaatgatgactgcagaagaaattgctaaaaaaggagtggagtgaggcattctactgttcatattgttaacaaatatcaaaatgataggaacttgaagaatctaagactgttaaaatcgagacaataagaaactcgttccaaatttgaatcctataatgaattcgtctcatgaagaagttatttacttttcattagactgatttactaatcaaaaaacttctatcacgaacgcttcaatttcctgtatgcgtgtgatagaagtttttatttttgttcatattaatttatctaagcgctacgatggactgacttaaacttttctttaaaatcgctattcgccatttactattgttgtctaatttcttgtaaaatatgttccgctgcttgtgtatttgcacggggttcttttttcaaagcttcagctactttagcaatttcatcaccttttgcccctacaacgatagctaatgatttatattgtaaactcatatgaccttgttgaataccttctgacacaagcgcgcgacatgctgcaaagttttgcgctaaaccaacggcagcaactacatgacctaattcttgtgctgactctacatttagtagctctaatgaagctttagcaattggtaatacttttgtaccaccgccaacgattgccaatgtcataggcacttcaattgtaccaatcaatcgttgacgatcttgatcgtaacgccatgtagcaataccacgatactgtccgtcacgactcgcgtatgcatgcgcacttgcttctgcaccacgcgtatcatttcctgttgctaaaacaacagcatgtatgccattcataacacctttattatgtgttgctgcacgatgaatatctacttgggccaatacagaagcacgttccattcgtttggcaacctcttctccagttctctcgccccttgctaaatctttaacatcaatttcgccttgaactttaacaacggacgctgttgcatgattggataaaatactcattaaaatgtcgctttgcggaaattcattttttaaaaatgcagttatggcctctaaaatcgtattaagcatattagcgcccatagcatctttcgtatcaacaaatacttttaaagatagtaactgttgctcaggaaatgtatcaatcgctatacgttggtaaccaccaccacgcgctttaatagaaggatatgcctcatccgcaattttatgaatttgcttttctaaagctttaatgtctgctgataatttttcagtatcgtcaacgccatcaaagacgatttgacctatcataatacgttcagaagataccgttttaaatccgccagtctgattcactagctttgcaccataactagctgcagcgacaactgaaggctcttccaccatcataggtacaacatatgccttatcgtccacaatgatattcggtaataatccaacgggtaatgcaccttgcgcgatgacattttcaattaaactattggctacttcttcatcgattaatggatgattcagtaaaatgtcgaattgttcttctgataaccattgcttatcaaccaattgttgtaacttttctttacgagataaatgtcgaaaattcttatctaaattttgcatggacgtactccttttacttcacataatttttaacatttcaatcactactatttttaccacaaaataacgtcattcgtcttaaaattcaattgaataattgtcgttttgactttaaaataaaacaaggtaaattaaaacgcttacaagaaacgacaaatcatttttaaatttagtatatttctttgtataaaattagcatattctgatatgatacaagtgttgcttttataaatttgaaaggatgtaaaaccttatgacaataggtatcgataaaataaacttttacgttccaaagtactatgtagacatggctaaattagcagaagcacgccaagtagacccaaacaaatttttaattggaattggtcaaactgaaatggctgttagtcctgtaaaccaagacatcgtttcaatgggcgctaacgctgctaaggacattataacagacgaagacaaaaagaaaattggtatggtaattgtggcaactgaatcagcagttgatgctgctaaagcagccgctgttcaaattcacaacttattaggtattcaaccttttgcacgctgctttgaaatgaaagaagcttgttatgctgcaacaccagcaattcaattagctaaagattatttagcaactagaccgaatgaaaaagtattagttattgctacagatacagcacgttatggattgaattcaggcggcgagccaacacaaggtgctggcgcagttgcgatggttattgcacataatccaagcattttggcattaaatgaagatgctgttgcttacactgaagacgtttatgatttctggcgtccaactggacataaatatccattagttgatggtgcattatctaaagatgcttatatccgctcattccaacaaagctggaatgaatacgcaaaacgtcaaggtaagtcgctagctgacttcgcatctctatgcttccatgttccatttacaaaaatgggtaaaaaggcattagagtcaatcattgataacgctgatgaaacaactcaagagcgtttacgttcaggatatgaagatgctgtagattataaccgttatgtcggtaatatttatactggatcattatatttaagcctaatatcattacttgaaaatcgagatttacaagctggtgaaacaatcggtttattcagttatggctcaggttcagttggtgaattttatagtgcgacattagttgaaggctacaaagatcatttagatcaagctgcacataaagcattattaaataaccgtactgaagtatctgttgatgcatatgaaacattcttcaaacgttttgatgacgttgaatttgacgaagaacaagatgctgttcatgaagatcgtcatattttctacttatcaaatattgaaaataacgttcgtgaatatcacagaccagagtagtcggtgtatttaaaacacatataataaaacctaaaagcagcagtaagaccacttctaattgaaatcgtcttactgctgttctctatttataacacttcgtattgaatgaattcattatgcctatttgacacattattgaagttttcctaatgcctggatcctttatacgttacggcttcgtgctatgttttggtacataaagctttgacatatcgatattctccaactctaacagcttaattttattattaatcgttccaccgaaccctgttaagctacccgttttaccgacaacacgatgacatggcacgataatagataatggattacttccgactgcacctccaaccgcttgggctgacatttttggcttgttaagcagcttgcctacttttttggcaatagcaccatacgttgttagagtcccataaggaacctgtcttaattcattccaaacacactgttgaaaatgactacctgttggctttaaaggtattgtgatttcaggattgtcacctttaaaatacgcgtctaaccactgtgtcgcctctctaaatatcgctaaagacgtattttcttccctagtaccatcaccttgttgattttcaaacaaaacagcggtcagacttaccccatcactcaaaagttccaatcgtcctacaggcgaatcatagtaactcttatactccataaaaatcccccctttttctaatcatacgccttaattgttaaattagaaaatattcatgttcacattttttaaaaataaataagtcgtcaattacgtatataaacacgtaataccagctatcactttgctgcaatatacagttacatatcttactacacgtgctaacctcttactttgtaaaccaaatcttaaattaaaatattgaaaatgcaatgaatccttaatattttattaaacctataattacttattaaaaataacacacaatattcataaagttttaaaaatattctgttttatcacctactattagtggaaaagtacaattgcaattgtatatagtttgcataacgcttcaaaagtaatttcttttttgtttagttcaaaaaaatttagaggtgatgttatatgaataacggttttttcaatagcgactttgattcaatttttcgaagaatgatgaaagatatgcaaggttcaaatcaagtcggaaacaaaaagtactatattaatggtaaagaagtttcacctgaagaactagcgcaactcacacaacaaggtggcaatcactctgctgaacaaagtgcgcaagcttttcaacaagcagcacaaagacaacaagggcaacaaggtggcaacggcaattatttagaacaaattggtcgtaaccttacgcaagaagcacgtgacggtttattagatccagtcattggtcgtgataaagaaattcaagaaactgctgaagttttaagtagacgaactaaaaacaatcctatattagttggagaagctggtgttggtaaaactgcgattgttgaaggtttagcacaggcaatcgttgaaggaaatgtaccagcagcaatcaaagacaaagaaattatttctgtagacatttcatcattagaagctggaacgcaatatcgtggtgcttttgaagaaaatattcaaaaattaatcgaaggtgttaaatcttcacaaaatgccgtactattctttgatgaaatccatcaaattatcggttcaggtgccacaggaagtgattcaggtagcaaagggttatctgatattttgaaacctgcattaagtcgtggtgagatttctattattggtgcaacaacacaagatgaatatcgaaacaatattcttaaagatgctgcattaacgcgcagatttaatgaagtgcttgttaatgaaccaagcgctaaagatactgttgaaattttaaaaggtattcgcgaaaaattcgaagaacaccatcaagtaaaattaccagatgacgtattaaaagcatgtgttgacttatcaattcaatatattccacaacgattattaccagataaagcaatcgatgtgttagatattacagcagcacatttatctgcgcaaagtccagctgtcgataaagttgaaactgaaaaacgaatttctgaattagaaaatgataaacgtaaagcagtaagtgctgaagaatataaaaaagctgacgacattcaaaatgaaatcaaatcattacaagataaattagaaaatagtaatggtgaacatactgctgttgctacagttcatgatatttcagatactattcaacgattaactggtattccagtttctcaaatggatgataacgatattgaacgtttaaaaaatatttctaatcgtttaagaagtaaaatcataggtcaagatcaagctgtagaaatggtttcacgtgcaattcgccgtaatcgtgctgggtttgatgacggcaaccgtccaattggcagtttcctatttgttggccctactggtgttggtaaaacagagcttgctaaacaattagcaattgatttatttggtaataaagatgcactgattcgacttgatatgagtgaatatagtgacacaacagctgtttcaaaaatgattggtacaactgctggttatgttggttatgatgacaattcaaatacgttaactgaaaaagtacgccgtaatccatactcagtcattctatttgatgaaatcgaaaaagcaaatccacaaattttaacattgttattacaagtaatggatgatggtaatttgactgatggtcaaggtaatgtcatcaactttaaaaatacaattattatttgtacatcaaatgctggctttggcaatggcaatgacgctgaagaaaaagatattatgcacgaaatgaaaaaattcttccgccctgaattccttaaccgcttcaacggcatcgttgaattcttacatttagataaagatgcattgcaagatatcgtcaacttattattagacgatgtacaagttacattagacaaaaaaggtattacgatggacgtttctcaagatgcgaaagattggttaattgaagaaggctatgatgaagaattaggtgcacgtccattaagacgtattgttgaacagcaagtacgtgacaaaattacagattactatttagatcatacagacgttaaacatgtggatatagatgttgaggataacgaattagtcgtaaaaggtaaataacgacactttaacatatcgcgcatcaaaaatgagcatcaggtcgcccttgcctgtgctcatttttttaattatttccctggaaaatgattcgctgtgtgctgttctgttccacaacaatcacgattaatgtcacatgtaccacattttccttgttttgaacgcttgaaaaattttactagtgtatataaggcatatccgaaaattgctaaaaaaattaaaatgttaataatgactgacactttaaccactccttaaacaaataaatgtccgacttgataaaaaatgaatgttaagacatatgcagtgactagaggataggcaactgcaagtgccgtccatttccatgaataagtctctttacggattgctgctactgtagaaacacaaggaatatacaatagtataaatatcataaatgcatacgcagatagcggtgtgaattgattttgaatcacattaacaaggcctgcatcacctgatgaatagataatcgccatcgaacttacgataacttcttttgctaaaaatcctggcactaacgtagcacctgcttgccatgttccaaatccgagcggttgcactaacataccaaagaaactaccaaccatatgtaaaaaactttgattgatattcacattgataccatgtggtcctacataacttaatagccaaatgactactgagccgccaaaaataaatgtacctgctttacgaacaaagcccttagccttttcccaagtactacgccacaacgttttaatggaaggcacacggtatgttggcaattccacaataaagattgcattatcattttttaaaatcgtcttagtaagtactgtactgactaaaaatgccataataatacctaaaacatacaggcttaatactactaaagattgattctctttgaaaaagatacctacgaacaacgcatacactggcagtctagcagagcatgacatgaatggtgcaattaatatcgttgttaaacgctctttttcattttcaatactgcgcgcagccataatactcggtacattacaaccaaatccgataatcattggtataaaagacttcccgcttaaaccgaacgattccataatacgatccattaaaaccgcaatacgtgccatataacccgaatcttctaataaagatataaagaaaaagagcacaacaatttgtggtacaaagactaatactgatcctacaccagcaataatgccatctgtaattaaatcttgtaaaaatggtataacaccaagataattcataatcgtcttcacactatctgtaaatgtaccacctataaatgcatcgagttgatccgacaaaggtgtgccaatccatgtaaatgtagtttgaaagatcaaccacataattgctagaaagataggcatccctatatatttatgtgttaatatcttgtctattctagagctgaaatattgcttatcttcatctggatacgttaccacgtcttgcaataacgtctcaatataatgattgcgtatacgctccatctctcgacgaacagatacagcccctacttgttcagcaacttgatcacgtaaactcgacaatttatttacaacctctgaattaagttcgtttgcaatttgcatgttatttaataagaattgaatcgcaataaacctagcttgatacttatcatgagatgtctctgtcattattatttgacacatatttttaattgtctcttcaatcttctcaccataattgattttaaaatgcggttgatacccttcccctagatgctttatttcgccaagtaaatattttgttcctttgcctgtacgtgccacaactggaaaaataggtgtttttaactttttcatcaatttatgataatcgatttttatcccgcgctttgtagctacatcaatcatatttaatccgatgtatattggttgattaagttctaacaattgtactgttaattgcatatttctttttagttgactcgcatcaacaatgttaatgattcctgaaaatgaatcgtttaataaatagtctgtcactacagtttcatctttagaaatcggcgataaatcatatgtacctggtaaatcaattaattgtcctacattttctttaagtttccctacttttttctctaccgttacgccactccagttgcctatatattcatacgaaccagttaaagcgttaaacaaagatgttttaccaacattaggatttcctaaaatacaataattttccattcgtccggctcctattcttctaatgcaatagaacaagcatcgcaatgtctaatacttaactgttgtccgtttacttcaataatacatggccctttaaataaacatttttgtttaatcgttatgatagcgtcatctgttaacccaaaggcacttagacgatacaacatattctcattagcaatatccattcgctttattttataagccttattcatttcaccatttttaatgtttaacatactatttcgctctcctattagaaataataatcattatcacttaaaaatcataacccttaaaattgtagctcgcaatactttatttaaataattttcatttttcatgtaaaatttgtgacattgcaaaaatgttttgtataatcacttccatgcaaaaaacctccgcttcaaatgtcattgatagacatttaaagcggaggcatgtacatgttattttatgatttatttcgtagatttttttctaacaattgattgagcttttcaatatttttattcaactgttctatattcgttgcttgttgttttgaatttagttgatgcttgttttgataatctattaaagcatcatataagaacaatgaacttgctgattgctgtttcacttcttggtacaatgccatcgttttatcatctagtactattgaatgtgcatcatcttgcccatgtgcatcttgatgtttcgatacatttgttgcaccttgtggatatactttaaaggttgtgtcgtatgtttccttactatctttagcttcagattcctgtgattcaaccgttttatatttttcaagtgcatgtccttcaatatcaactcgtggaataatgcgattcaaccatgctggtaaataccacgaaccttttccaaacaatttcgttaatgcaggaattaacatcattctgactacgaaggcatcaaagagtacaccaaacgctaatgccatacccattgatttaatcatgacatcttcttggaatacaaacgcaaagaagacactaaacataattaatgcagctgctacaataacaggaccgctttctttcaatcctactttgatagaataatcattatcccctgttttactatattcttcatgaattcgcgacataaggaagacttcataatccatcgctaatccaaataagatacctatagtaataaccggtaaaaatgctagcattggtcctgtcgtttcaataccaaacagacctttcataaaaccatcttgcattactaatgttgtaaatcctaatgttgccattaatgacaagacgaatcctaaaactgcttttaatggtattagaattgaacggaagacaatcattaataagaaaaatgctaatacaacaatgactgaggcaaataaaggtatcgcctcatttaactttttagacatatcaatattaatgacactttgtcccgaaatctccgttttgaacccatatttatcttgtgcatctttatgataatctcgtaaatcatgcactaaatcatttgtactctctgcattaggcccttgcttaggtatcacgaccatcaaagcgtaatcattatctttactcatttgtggtggcgtaacgatatctacatttttcttatctttaatatctttatatacagactgtaaatcttgttgtaatccttgtggatcatcctttttatctttcacatttatcaacatcggtatttggccattaaatccttcaccaaatttatccgagataatatcgtaagcttttttctgtgtagaatctgctggtttaacaccgtcatctggaataccaagtcgcatatgactaactggtattgcagctgctactaatatgattaaacctagtaatactgccgcaagtgcatttcctgtaataaatttagaccatggcgtatcaatatcttttttgaatttagactgtaatttattcactttaatgcgtttatggaaaatgcttattaatgcaggtaataaagttaaagcgctaagtactgcaaaaacaacactaattgccgaagcaaatcccattaccgctaagaagtcaatgcctactaatgataaaccacatactgcaattacaactgttacaccagcaaaaacaactgcactacctgctgttcctattgcaagaccaatgcctttaatgtaatctgtttcagttttcataacttgtcgatatctgaataaaataaataatgcataatcgataccaactgctagtccaatcattacggctaatgtcagtgtgacatttggtatatcgaatgcataagttaacaaactgataatacctacaccagaggctagaccaatcaatgcacttataattggtaatcctgcagcaatgactgaaccgaatgtgattaacagtacaacaaatgcaacaataataccaactagttcagaattaccgcctacttctgtagatgtcattcctgtaccagttaactctgtttgtacattatgattgtcacgtaagtctttcaaatgacttttaacattatctctagagccatcttttaaagatgtttgactaacgtcatatgtgatatctgcaaatgcagttgttttatctttactaatttgcttattttcataaggatctgatattttatcaatgtgcttgtcatcttttttaatatcatctaacgttttcttaatatctttagtaatgttcggttgcacaataccatcatctttagtcgtcttaaagacaacacgtatttgtgccttttcactatcttgattaaaatgtttttcaatctttttattcgtatctaacgactctaatcctgtcattttaatatcattgtcaaatttcggtgcatttgtagcaagtggtatcaatattgcagctacaatcactatccatgcaatgaccgcggaccatttatgttttgcgatgaatgtccccatcttatataaaaattttgccaaagtatattgcctccttttaaaatcaacgttatagtttaaatatacagtgtagattattgttcgattatagtatctatccccgacctcttaaagaatcaattggaaaattttgtatattaaactacacacaaaggagaaatgtagatgaaagagactgatttacgagttataaagacaaaaaaagcattgtcgagtagcttgctacaattgttagaacagcaattattccaaacgattactgtcaatcaaatttgcgacaacgcactcgtacaccgtacaacattttataaacatttttatgataaatatgatcttctagagtacttgttcaatcaattgactaaagactactttgctagagatatcagtgaccgtcttaatcatccattccaaacgatgagtgatacgattaataataaagaggatttgagagaaatcgcagaattccaagaagaagacgctgaatttaataaagtattaaaaaatgtctgcattaaaattatgcataacgatatcaaaaataatagagaccgtatcgatattgacagcgacatcccagataatctcatattttatatttatgactcgttgattgaaggttttatacattggataaaagatgaaaaaattgattggcctggcgaagatattgataacattttccatagattaatcaatattaagattaaatagtagatgagaaactcatgagcgttaccaacattcataataaaaacgatagtgtacacgttaatgaattcgtgtactactatcgttttttatttttatcgtgcttatcgctattaaaacaactgatacacaacacataaactatgaagaaaaaaataaatccgctatctaaatgactttgactcagttgtttaaatgaccaaattgctaatacaattcccattattattgaaataacgtatctcacattcttatacctataatccttttctaaaaatatggttgctattacttaatttttaaagttataaataaaaagagccaaccgcaatggatggcccttgttcattatgaagcattagaacatttctgaaacaaccttttgttctaagaagtgtaataagtagtctggactacctgttttagcgtccgtacctgacattttgaaaccaccaaatggatggtatccaacaactgctgaagtacagcctctgttaaggtataaattgcctacatcaaattcgtttaccgctttaatccaatgctcgcgattatttgtaatcactgcaccagttaaaccgtaatctgtatcatttgcaacctcaattgcttcatcaaaatcgttaactttcacaaagccaacaactggaccaaaaatttcttcttgcatgattctatctttagatttaagtcctgaaatgattgttggttctacaaagtaaccttttgaatcatcagtgccgccaccttgttctaatttaccttcttctttaccaatctcaatataatttttaatcttatcaaattgttttttattaataactgggcccatatacgtattgtctacagtattgcccaacgttaattcttttgttaatttgattgatttctctaatacttcgtcataaacgtctttatgcacaattgcacgtgaacatgctgaacatttttgaccagaaaaaccaaatgctgacgttacaatagcttctgctgccatatctgtatcaatattttcatcaactacaatggcatctttaccacccatttcagcgataacacgtttcaagaagttttgaccttcttgaacaacggcactacgttcataaattctagtacctgtcgcacgtgatcctgtaaatgtaacgaaatgcgtatctttatgatcaactaagtaatcaccaatttctttcggatcaccaggaacaaagttaactacgccttttggtaatcctgcttcttctaaaatttccattaatttataagcgatataaggtgtatcctcagcaggtttcaataacactgtattacctgccacaactggtgctaaagttgtaccagccataatcgcaaacgggaagttccacggcggaattgtaacacctgtaccaattgatttatagaaatatttattgtgttcaccttcacgatcaagtactggcttaccttgagccaagtccatcattgaacgtgcatagtattcaataaaatcaataccttcagctgcatcaccaactgcttcatcccatggcttacctgcttcataaaccataattgctgcaatttccgcttttcgacgacgaataattgccgaaacacgtaacataagctctgcacgatcatttgctgaccatgttttccaagatttataagcttcgtttgctgctttaaacgcatcttcaacatcttgttttgttgcctttgatgcatttgcaatcacttgtgatgtgtctgcaggattgattgatttaattttgtcatctttgaaaatcttctctccattaatcactaatggtatgtcttgacctaattctttttccacgtctttcaatgctttcttaaacatatccacattttcttggactgaaaaatcgtaaccaggttcatttttaaattctactaccatgtacacttaccccctataaattttgaaagtggtttaaccctttgatttaatgatataacatcatttaaactcattttactatgattaaggttagttttgcaatcgctttcatttttatgttttatcacttattctcaagtattttgaaattgattggttactttttaaaatttatatgggtcgcaactgctactttatcgtttcgtcatttaatgtttcggatggtaggtcattatcaattttacgaacgactttacaagggtttccaaccgctaagctgtgtggcggaatatctttagtgacaacactaccagcaccaatcacactgccttctccaatcgtcacccctggtaacacggctacatgaccgccaaaccaagtattactgccaatatgaatgggtccggctttttcaaaaccttcatttctatgatggaaattaagtggatgtgtcgctgtgtagaatccacaattaggtcctataaaaacattatcgccaattgtaatctgtccaccatccataaagtaacaattggtgtttacatagacattttttcctagtttaacgttccaaccataatctgtatcaaaaggaatcgaaatacttacattgtctgttgttgtttgaaataattgatcaattaattcctttcttttatttgtagcactcggtcttgtatgatttaattcaaagcaaatatctttcgctcgtgcacgttcattgattaagtattgatcaaagtttgcatcgtaccatttttctgctaacattttttctttttcagtcattacacctttcaactcctaataacttatttacttgtttaaaagttaatcaaataaaccttcgcctatgcaactaatacgctataacattatgaaatcatgaccttatcacccttatctatacaattctcgcatcaaatactgctaaagtagtagataaattcaatactacagacgcattcattttttaatctattaacgtacaatgtgagtaagagaaatataaaggagtatgatagcgatgagaatattaattacaggcacagttgctatcttaatcattctaggtttggtcaaaacgatacaagattacgaaatgacaaacgacacgagtcgtcagttgtcagacaacaaagatgatgataaagtcatccatcttaataattttaaaaatttacatgcgaaagaatttaacccatctgatttcttttaagtcacctaagaattgcaaatccagaagtcatttaagttttacctttcattcatacatcctttaatattaattacgacttcttttatatagatgctaagtagagagattgttgtgcaatgtttgcacggcaatctctctttttctttttaaaattggtaaaagtaaaacgcaacgattgacttatatacctatagggggtacattagacgtgtaacaatgaatcacagggaggcaataatgtggctaatacgaaaaaaacaacattagatatcactggtatgacttgtgccgcatgttcaaatcgtatcgaaaagaaactgaataaacttgatgacgttaatgcccaagtgaatttaactacagagaaagcaactgttgagtataaccctgatcaacatgatgtccaagaatttattaatacgattcaacatttaggttacggtgtcgctgtagaaactgtcgaattagacattacaggtatgacttgtgctgcatgctcaagccgtattgaaaaagtgttaaataaaatggacggcgttcaaaatgcaacggtcaatttaacaacagagcaagctaaagttgactattatcctgaagaaacagatgctgataaacttgtcactcgcattcaaaaattaggttatgacgcgtctattaaagataacaataaagatcaaacgtcacgcaaagctgaagcgctacaacataaattgattaagcttatcatatcagcagtattatctttaccactattaatgttaatgtttgtacatcttttcaatatgcatataccagcactatttacgaatccatggttccaatttattttagctacacctgtacaatttattattggatggcaattttatgtaggtgcttataaaaacttaagaaatggtggcgccaatatggatgtacttgttgctgttggtacaagtgcagcatatttttacagtatttatgaaatggttcgttggctaaatggctcaacaacgcaaccgcatttatactttgaaacaagcgccgtactaattaccttaatcttattcggtaagtatttagaagctagagcgaagtctcaaacaaccaatgcgcttggcgaattattaagtttacaagctaaagaagcacgcattttaaaagatggtaatgaagtgatgattcctctaaatgaagtacatgttggagatacacttatcgttaaaccaggtgaaaagatacctgttgatggcaaaattattaaaggtatgactgccatcgacgaatctatgttaacaggtgaatctatccctgttgagaagaatgttgatgatactgtaattggttcaacgatgaacaaaaacggtactattactatgacagcaacaaaagttggcggggacactgcgttggcaaatattattaaagttgtcgaagaagctcaaagttctaaagcgccgattcaacgattggcagatattatttctggttatttcgttcctatcgttgttggtatcgcactattaacatttatcgtgtggattactttagttacaccaggtacatttgaacctgcacttgttgcgagtatttccgttctcgtcattgcttgtccatgcgcattgggacttgctacaccaacttctattatggtaggtactggtcgcgctgctgaaaatggtattttatttaaaggtggcgagtttgttgaacgcacacatcaaattgataccatcgttttagataagacgggtaccattacaaatggtcgtccagtcgtgacagattatcatggtgacaatcaaacgctacaactacttgctactgctgaaaaagattctgaacacccattggcagaagccattgtcaattatgcaaaagaaaagcaattaatattaactgagacaacaacatttaaagcagtacctggccatggtattgaagcaacgattgatcatcactatatattggttggtaaccgtaaattaatggctgacaatgatattagcttgcctaagcatatttctgatgatttaacacattatgaacgagatggtaaaactgctatgctcattgctgttaattattcattaactggtatcatcgcagtggcagatactgtcaaagatcatgccaaagatgctataaaacaattgcatgatatgggcattgaagttgccatgttaactggcgataataaaaacactgctcaagccattgcaaaacaagtaggcatagatactgttattgcagatattttaccagaagaaaaagctgcacaaattgcgaaactacagcaacaaggtaagaaggttgcgatggttggtgacggtgtaaatgatgcacctgcattagttaaagctgatatcggtatcgccattggtacaggtacagaagttgccattgaagcagctgatattactattcttggtggcgacttgatgcttattcctaaagccatttatgcaagtaaagcaaccattcgtaatattcgtcaaaatctattttgggcattcggctataatattgccggtatccctatagctgcattgggcttacttgcgccatgggttgctggtgctgcaatggcactaagttcagtaagtgttgtcacaaacgcacttagattgaaaaagatgcgattagaaccacgccgtaaagatgcctagattccttaataatgaaggattcgttggtgattctgagataggctagtgattggctctataatgtcgcggtttacagttggatcttcgctccaactgcataagagccactaattattataaataataagtacactacggtttacagttggatcttcgctccaactgcataagagccactaattattataaataataagtacactacggtttacagttggatcttcgctccaactgcataagagccactaattattataaataataagtggctctaaaaggaggtgaatgctatgtcacaagaaattttaaatgttgaaggtatgagctgtggtcactgcaaaagtgctgttgaatctgcattaaataatattgacggtgtcacttcagctgacgttaaccttgaaaatggtcaagtaagtgttcaatatgatgacagtaaagttgctgtatctcaaatgaaagacgcaattgaagatcaaggttacgatgtcgtttaattaggcaatattcaacgtcatcaacaccaaattaaaaaatcgaactgatgagaatcccaacaatccaaattatctcatcagttcgatttttaatttactcgtaacctagtatctccagtctgcaatacatctaatgttgcatctaatgcatcgacaattagatttttaactgcagcttcagtataaaacgcaatatgtggtgttaatatgacatcttccctgtcaatcaacgattctaacaatggatcgttcagtgttttgcccctttgatcacttgggaaaagtttgcgttcaaattcatacgtatcaagtgctgcacctttaatcacaccattgtctaatgcgtctaataacgccttagtatctactaaagaacctctcgcacaattgacaaatactgcgccctttttaaaatgtttaaataattcagcattaaatagataatgattatatttcgttgcaggtacatgtaatgtcacgatatcagcaccttcaaccgcttcctcaatcgtatctttgtaatcgacatacgttgcaattttagcattaggaaacgggtcgtatgcgaccacatcactttgataaccattggcaaatatatcggctactacacggccaattcgacctgtaccaataacagctacttttaaatctttaatggatttcgataaaatagtaggttcccatctaaaatcatgctcccgcactttcgtttgaatttgattaaaatgacgaaccacattaatagcctggttcacagcaaactccgcaattgaattcggagagtatgacggcacatttgacacaataaagttatacttgtttgctaactccaaatcatatgtatcaaatccagcactacgttgtgcgatttgtttaatacctagttcatttaatcgtttataaacatgctctgataatggtatttgttgtgatagcgataagccatcataaccagcgacaccttcaacattgtcatcagttaatgcttctttagtaatatctacctcaacatgatgtttctctgcccacgccttgatataaggcatatcttcatcacgtacactcatgattttaatttttgtcattttaacatcacccttaactttattattcatataaatatgctagttctgttaatcttattgcagcttcgtctaatttctggtcatctaacgccaatgaaattctcacataacgattaccattctctccaaatggtttccctggagcaacaagtattgacttctcttgcactaaaaattgctcaaattgctcgctgtcataaccaggcggtgtttccaaccatacatatatgccacctttagcatgaacaaatggcaaatcagcttttgcaagcatggcttcgaatcggtcacgacgtgttttaaatacattgctttgttcttctaaaaaatcatcataatgattcaaagcatatattgcggcatcttgtaatgcaccaaacatcccagcatttgtgtgcgtttggtactttttcaaagcttgaatcatatctttattaccaactgcaaaaccgactctaaaacctgacatgttataacctttagacaaggaataaatttcaatcgcaacatctttcccattttccgaagcaagtatactaggatttttagcgtcgaaaccgaaagcaccataagcaaaatcatgcacgattttagtgtctgtacctttaaatttagctatcgcttcatcaaaaacttctttcgtagctgtcgatccagttggattatttggatacgttaaataaatgagttttgttttatctattatttgtgaatcaactttggaccaatctggcaaataatgtggcggttctaaattaagcgggactggcttgccatcagctaaaagtacacctgctaaataatccgtgtagcctggatcaggtagtaatacatagtctcctggattgataacacatgttggtactgccactaatccattttttgtaccatataaaatgcatacttcatcttctttatctaacgtcacattatattgtctttgataaaaatctacaatagcttgcttgaacgcttctttaccatgaaaagcaccatatttttgattttcaggaatagttagtgctttttgaaaatgatcaataataccttgtggcgtgggcccatcagggattccaactgccatattaattaatggcaatggtccatgttcgattttacgtcccatcgttttcccgaaataactatcagggatatttgctaatttgttagagatcatcaaattcctcctctatcattaaacatagcctgggcgactatcataatcctaacaacttgtatcactctcatttagatggttacaatgacatcgccattcaccgttatgttcaacagaacttatgacacacgttgtattgaatgaatttattttcattttaggtaggtataatattattgtcaatattaggaattttcagattaatatgcactcaatcgttatgatttaactgtcatgcatatccgcatgcgcaaccagttagatatgcttatataaagtataacgcccatcaaggtacgtattcaaacgtgaaccttaacaggcgtcattcattgttaaataaaacttcttaagcacatacttatttcactatgccttttacgttccccttatacttttctcacatctttctcttagactactcccttatacgccccgctcaatatctttaatcatttcatctacagttattttcgcactcgttaagacaataggaacgcctgcacctggatgcgtacttgcacctgcaaaatataaatctttataatctcgcgatacattttgtggacgataataattactttgcgctaaagttggcattaaaccgaatgccgaaccaaatttcgcatgatacgtttgctcaaaatcatttggcgtaaagattgtttctgaaacaatatgcgattttatatcttcaaatacttcaatcgttgctaatttacgataaataatttcctttatttgttgcgtcaaagcttcatctgaccaatcgattccgctacctgttttaagttccggcgtcggcattagcacataaataccagttttgccttctggcgcaagtgatttatcagcgaccgctggtacatacacataaatagaaggatcatatgataaacgtccctcaaatatttcttcaatattgcctctaaagtcatctgaaaaaataacattatgaagtctcacttgatctgtcacatcaatatctataccgatatacattaaaaatgctgaacaagagtaatctaagtctgcaattttatgtggtggatactttttaataggtgcaaaatctggcattaatgattccgcaacactagggaaatcagccgtacataaaattttatcaaattttcttatgtcaccattcacttttatcgcatcggcccgtttgaatttaggatcaataataatttgctcaatttcagcatttagttcaatattaacgcctaagtctttatttaattgcgctagcccttgagccatgccatacataccgcctttaataaaatgcacaccaaacatcatttcaatcataggaataattgaatatagtgacgggcctcgttttggatcaattcctatgtataacgtttgaaacgctaaaagcttttgtatcttttcgttatcaatataatgttcaattagctgatctgcatgatttaacgtttttaacttagcaccttgcacaagtgacgtcatattataaaagtcactcggtttgcgatacgttctttctaagaaatagcgacgtgcaatttcatattttttataaacatccgttaaaaaggacataaaaccatgcgttgaaccaggttctatactttctagcatttgctgtaattcagctaaatctgtaggcaccgttatacgatcatcgtggtcaaaatacacatcgtaaatataacgtaattgtctcaattcaatataatcttcataatttttaccacacgctgtaaaaacatctttataaacatctggcatcatgacaattgtgggacccatatcaaatgtaaagccgtctttctttaattgattcatacgcccgcctacattattatttttttcaaatatcgtcacttcatgaccttgagaagcaatacgggctgccgctgctaatcctgtgacacctgcaccaattactgcaatcttcattattcaaccacctatattctatgatatttactatttatttcatgaaacaactttgcctttttcctcttatccacaaaaacacgttcatgtaatgtatagttagcctgtctcacttcgtccagtatttcaatatatatacgtgctgctaattctatgattggttgtgcttcaatactaaatactttgatttgatccataacatcttgaaaatctttttctgcgatagctgcataatattcccataagtcaatataatgattattaacaccattttggtacacttcagcaatatcaacttcatattgctttaatcgttgcttactaaaatatatccgttcattgtcaaaatcttcaccgacatctcttaatatattaatcaattgcaacgattcaccaagtcttcttgcgacatcgtatgtctgatgtgtttcatgatcacttaaaatcggcgtcaatacttcacctactgtaccagcaacaccataacaatatccgaataattcagcgtccgtttcaaacattgtaaaatgttgatctttatatacagtatcaatgagattataaaaagattgaaaggcgatatttttatgttgtgcaacatgctgaagcgccatcatgattctacgatcactttgaaagtgatgatgttcatatgggtatttttcaatagattgtatatcttcttttatttgatttaaaaattgaatatcgccataaacatctatactgtcatcaattttacgacacacagcataaattgcccaaaccgcttttctttgatcttctggtaacaagtcaaaagcgtaagaaaagctttttgaatgtttcttcatgattttatgacaatatttaaaattcatatccatcattgtcatactagtcctcctatattgaaatgccattaccttgatttattgttctttagatatagaatattgacgacctttccattcaactacaccataacgatgcgtttgtttccaagattggatgaaaattttagtaaaaaacataaataacaatggatgacataccattaataaattagaaaattggccgacccttcgatgcagataaataaattgtgtagtatagctcaagtaaagtgctaccatttttcttacagacatttggcgatattttaaactaagacatagccctaaaatactcgctatagaaccaaacaaccacaacacaattgctgtcatgatcttaggctttgtgccacctgccccagttgacaaatgctttgtccatccttcttgtaatgactgaaatccttcttgatacatgcgaaatgcaacaaatggaaacccttcataaactgttacgggcaatgattgtgaagtatatgcacttcctaaagcaaatccttcaataatatgacggtttgcacttttatgacctccagttgcataataatcttctttatttgttaatgtcaccggtccaaatgcatgctggttagtccgaccgtcgtctaaggtagaaaatacattcataccaacgactgtcattaaattaaatatcgctgaaaacccttcgtagaaacgctttgttatatgataaggctgtacgcttaacaatcctttttcaccttgtaattgatactgattaatcaacgtttcaacagcatctttccttaagaaagttacatcagcatctacaaaggcaatgcgattcgtacatgcatgcgtcacaccttgataacaagcatgtgatttcccataccatttgccgtcagtatcatcaacaacatctactacagtcgcaccatatgaacgtgctacacgtgctgtttcatctgtcgatccgtcattcataacaatgacatctactggaacttgctgttgtattatcgaatgtagtaaatgacctattcttttttcttcgtttctagccggaataataattgttaatgctttatgattgaagttcagcgttttcgcctttagctgatgtctacgattaaatatcaatgcaccacacgccatagacatggtcactattactgttaatattcgtgataaccatttcatagatatcacttcctattcttcgcttctcgcgcgtttattttgtctgcgacttgttgcccacttaatgtaaccattggcatgccaccaccaggatttactgatccacctacaaagtacaagttttcaaaatactgactttctttaggaaatttaaatcctttgtttttctttttatctgctacaacaccatatattgcaccacgattagaacgataatttttttcaatatcctccggtgtccaaacatcttcataaataatgtgttttcttaaatcagtaagtcccattttttctaatttatccaaaattttatccctaaacttcgcataatcttcagtggtaaaaggctgatcttgaatatatggaatatgtggtaagactttgatattttcataacctactggcgcttgtgtgtgatcagttttattcgtatttactagataaatggtcggatcatctggcaataccttttcatgaaaaacttgttgataattgagataagcattttccgtaaaaaagaaattatgatgtgctaattgcgggtattggcaagcaacacctaaatgcatcacatatcctgagcttgccggctcaaattccctctctaatttgtttaatcgttgagtatcaaggtgaattaaatatttataagtaggtatgacttccatatttgaaataatataatctgcctttacaaactcacctgtatctaatctgacacccgtcacacgtctttgatatgttttaatattgtccacacgtgcacctgtatgaattgtgacaccttcttcacgcgctagcttttccaaggcattggctaaatgatggattccaccttctacataccaaaggccttgctcttgttgcatatggaataacatagataatacagctggcgcatcgtatgatgaagaacctacatatttgataaaatagcctaacatttgtcgcaagtatggattcgagatacgcttgtctatggcctgttgcatagtatgtacataatcataattaataagagcatttaatggcccatgaaatttaataatttgagatagtgtatctaaaccatagttgaaataccctttttcagtaatacgatcgattcgtcttgtataattcaaataattttgcagttcctctatatcctgtttcgacaatatcgcattatgctgacctgtttctttaataccttcatacaaatcgatagtcgttccatctggaaaaaagctacgccattgatgtggcaatcgcttgattgtaacgtagtctgacatttgcttcttgctatattcgaataatttttcaaaaatataaggcatcgttaaaatagatggacctaaatcaaagccaaagccatctgattcatgacgattcactttgcctcctatatgattattttgttcatataatgagaccgaatagccactttgtgccattcgaattgctgcagaaatcccacctaagccaccaccaataacgatgatatgtttagtcatgacgttcacctcttcgttttaatatgcgtagtaactgcgttaatctcggtcgattatagcgttgcacaataatgattggaacattagctatcattgcatagaaaatatttatatactttactaaacgagggcctttattgaatatgatgactggaagtatcgatatccaatgaatcaactctgccctctttgtctctataatcattttttcaatttcatcagtattgattgtcattaaatgacgctgatcatatatattttgattaagctgatgaccatctaaaatcttatgtttccattttcttacgtaaaaccatttgttccaaaattttccatgcttctcaaagttaaatgatttaaatattatgtacttctgacgaaaatacttatcaggaattcttgtacctaaatttgctatatttagttgaacaattaaccaatacatactacaaaaaaatgctgttttaatatattttttcatggttttcatctaaattgaatcactctcaatcatactgacatagtataaattatcactttattacttagttccctaaagatcagtgaataaaccgctctcatttatatttatataaaacaaaaacgccaatactctcatgttagagaatattgacgtcatttgatttacatttgattaatgaatgaaattatatgaacctgcttggtttgctgaaattgtacgagacgtaaccacaccagcaccatgtccatagttcatttctgaaacacgaacagaaccgttgctgttaacgccttcaacgtaagcaacatgaccgtaatagccttgtgttgtttgcatgatagcaccaacttttggtgtattgttcactgtatagccagatgatgcagctgcgttagcccaattacttgcgttaccccatgttgaaccaattttcccaccaacacgatcaaatacataataagtacattgtcctgaagtatataagttacttcctgatgcataaccattagaaattgaacgaccatttgaagatggcgctgcagttgtagtcacatgaacattattacttgttgtgctataacttgcacctgaaccaccagtataatagttatttgttgctgtttgactattgtttgtatagttattgtattgatatgaatgattatagtagttattgtaagatgcattgttataactataagtattgtagttgttgtagtagtatgtgttgttttgcgttaattgacttggattccaatttcctgtccaagtgtaatgataattaccttgtgcatcaattgtatacgtatagctgtatgattgagcgtcattagaattatatccattgttattttgttctgcggcttgtgcatcatgtcctgcaaatgcgatagtggcaagtcctgctgtagcgattgtagctgtaacgatttttttcataattaaatatcctcccaataatcaaaacactctatacatatagtcattagcgactcaattattttaaattttatattttttatttttttagtatgcaaacaattataacttttatagttttgcgacaaaacaaactataacagagattaggtgtcttgcgggctttgttatcataatgtaatctgttcctaataaagcttcattgaatgtaatataccaattagaatgtttacaacactttttctgcaccgttactatgggatttgaaaataaaaaagcactaaacttttaatgaaatacatcatttttgataataaatatcagaagtaatgtaatatttcaaaagtttagtgcatcaaattatttcttatttgtagcatgtgtttccatcgtttttacaatcaaatcagtcagcgctttactacctgcatattctaagtgaataccgtcatatgcaaagtattccggatgacctgcagaagctttataccaatcgactagatgtacattagagcgcttttcagctgcctcataaattaatttatttattctaccttcataatctctaggtactctaatagaaactaaatatatgtctgcttttccaaaactatccaatagttcatttaattgatctttcgtaaatgccccatttgtaccaagctctactacaactttttgaccttttttagcatagtctttatattgcgatttcacaattggtgtagcatcaacgagttgccgtccaactttaccatcaatttgtgcatttggtattttcttagtaaagacattaccaatatccaccatgaccgagtcaccaattaatagtggtgatgactttttaatatcctctttgctattcgctgtctgcttatcctcttgcttatcttttttaacgacttttttcttcgttgttttaaattccgtcttcttctctttcttctcggcttcatgttgtttgccaagtgcatcaaactgtccactgagcacaacgatagacggaaccaataataggataactaacactgttctagcaaattgccccttctttttaggtaaaaatgcaaaagctttaaatccttttttacgtataggtgtttcaataaagcgatacgaaatttcagccattaacgctgttaacaaaatttctataatataaacgtataccggtatttgtccttgtacgtaataactgttcacaaaaacaatgataggataatgccataagtataagctatatgatcgtttacctataattagtaaaggtttcatacttaaaaatttagcaaataaactagaaggatgtaccgcaattgcaataatgaataaagttgcaaatgatataatgtaaaatcctccattatagatccattgatcttggtctccaactataaagaacaaagtcattagaaccgcaaaaccagatatccctataatatctaatgatacgacaatctttttagaaatatcttttttcaaagcaaacggaggccaaataaatgctaatatacaaccaagcaataaagtttgcagtcgtgtatctgtcccaaaatacacacgtgaattatctccagtgatgaaatgaatcactatcataagtcctaaagaaatcaacgatacaataaatagcgtttgaataatatttctcggtttaaatctatgtaataagaacgtgataaccaatgggaaaagcaagtaaaattgttcttcaatggctaaagaccataaatgtttgagtggttcaatagcaaattggttaaaataatctacattctgtgaaatgtaccaccagtttgaaacatagaatatagctgcaatagcatctcgtttcatttgtataatcaattccggtttaaatatcagtgtgaacgtaagcacgacacagattaaaaataacactgccggaatgagtcgtttcaatcgtcgcttccaaaactctagcaaatcgattttttgcgtccgataatactcacttatcaacaaacttgttattaaataacctgaaataacgaagaatgtatctactcctaaaaagcccccacttaaccattgtgcattcaagtgataaataatgattcctataactgcgaatgccctcaatccatctaatccaggtaagtatcgcggggaatacattttttctaaacgtttaaagtcttttgtatccatgttaataaacgccccatttatttttctctattttgtagcatatcacaatatttttgaaaataaaatattgcactgattttcattaattgatttaacccttaattaagatagttttaaattttttattaagtagaaaacaattattacagttgatttcattactgcaaaccacatataaatttgtcgattttactacataacatagattatcatagattcttgaatttttagcaaaataactgttattttcattatatttttacaaaaaaggttcgttttatattttatgcatattactgtaacagaatcattaagatatgctattcgaatatactttttcaaaatttatataatgaataaattaacatgtattgaaaaaaaagcgaaatgcagcctatcctctaatgtaaaccaaacgatatatctcgtcagactttatatttaaacgctatgtgtcacttttaaaatgaatattactaagattgtcatatcaattattattgcatcgaattaatcttttaaatttctgtaataaaacctattatctacatctaatttaggaaaactacttggtaaatctcctcgcttaatttcacggaagccattattagaataaaaatactgtgcactaataaatttatcaattgttcctaaataaataccatcgatattttgttctttacatgtcattataactttatctaaaagttttttacctatttttaaattcctataacctttatcaacaaacatttttttaagtgcagacatattattatctagtctaatcaaacctatagtaccaacaatattttgatgattgtttattgcaagccaaaattgccctccattattcaaatagttatgttcgatgttctccaaatcaggttgatcatctctatcaatttttatattaaattcatttttttgaatcgataaaataaactcgattagctcttccttataagacctattatattcaattatgtttatagccatttttatctcctttttcatttaatttaattataaaatgtgcgtttagtttgtatctagtgtactcagtacagcctcaaatgaagtttcattccacttggcacttaataaagacaagtattttagcagtaatacaataaagtccaataaatttccctaacttcaatatccactttttaaaaaatgtatttttaattaataaaaaaactctccccaatttctatgggaagagctatatatttaatgtctaaacattacttttatttattatgaaggaattagaatccccaagcacctaaaccttgtgctttgtatgctttaacagctgcgttgatttgttggtcaacagtgtttgttggaccccaacctggcatagtttggaataaacctgaagcacctgatgggttgtaagcatttacttgaccatttgattcacgagcgatgattgcagcccatgtagaagctgaaacaccagtacgttgagccatgatttgagctgctgatgaaccagtagcacctgcagtattaccattgcttaatctcactgaacttgaagtagttgaagtgctgtagttatggtaagttggagctgaaacagcttcaacgtttgagttacttgattgtgcattgtagcttactgattgtacatttgaaccttggttgtatgaagtagtgtagtctgcacctgcaacgtttgagaaaccagcagtttgaccattagctgcttcatagctccatgaccatgtagtaccatttgaagtgaagttatattggaaaccatcttttacaaagtggatgtcatatgcaccatctttgattggagctgcatttaattgatcttggtgattatgcgctaagtcaactaagtgtgcttgatcaacgtttacttcagcagcgtgtgcttgatgtcctgtacctgctgcgtaacctgttacacctaatgccactgctaatgatgatgccataattgtctttttcatagtaaaaaatcctccagtaataattgtaagtttatgtttttagtaattatattttgaatttgaatgtcgtagtgcaagtttaaattgtcttttatttctttcaacggtactcactatatcacaaaaaaccagccagtaaattacactttctttacaaaacattacaatatcaagtgttatttgtaatgttgaaatatggctgttttatactgtaatgtgaaatatgtgccctttagaatccaatcaacccttgaaatagtctttaacacataagatttttactatatttagctcaactattacagctttcgtaatattacagattgtatttttgttacatagctgtaatatatctgacatgtaacttctcttattttcgtacattaaacgcaattaaaaagcaatcaacaaatatgtttctacacatgtattgattgctattattgttgtatattcaaagttttaaaacacacatcttttgtgaattgtcttatcttttattagcgcaaataaactgcagctcaattatattgttcaacttcattctcgcaattcacaataacattaaataatttttggtctcatattttcaaaaaacatactgttattatcccatgaatttaaaaatatcattagtatataaacgaaacactttacgataaatgatatctgcaagccaagctgttacaaatggtacaacaaagaacgctactacaattagtaagacactcaaccaagcagaatcaacctccataaatttaaatgcattaatcggtcctaccattcctataaaaccaaatccagctgactctttcgttccatgaatacctactaatgctgataccaaacctgatacaatggctgtcgttaatattggtaacataagaattggatatttcaccatattaggtatcatcattttaacgcctccaaagaagacggataacggcacccctaaacgattcactttacttgtaccaattatcaatactgcttcagtcgcggagataccaattgacgctgatccagctgctaaacctgtaatacctatcgcaaaggcaatggccacagttgatagtggcgaaataataataagactaaataccattgaaatcaaaatactcatgacaatcggttgtaattctgtaaaaccattaaccatattaccgatggctgttgtaatcattttcgtatacggcaatattaaaacaccaattgcacctgaaataccgccaacaactgttgggaatacaatcaatgccatactacctacgcgatgttgaataagtaaaatgaataacactgcaatcgctgctgtaatcattgtattaattaaatcaccaatacccgtaatcatccaagcaccatttttaaactgcgctgcaccgcttcctacatatgctgcacttgccacaacagcaattgctaatggcgataggtcaaatttcatggcaaccaatgcaccaatcaaagcaggtactgtaaattgaattgcaacgacaacgcctaataacgttttaaaaatcggatgataatccataaagtatttaaaaatttctccaagtatcgcattaggaactaaacccgcaacaatacctatggcgacacctgataaaactctaaatataaaatctttgggtgtaattgttttaattgatgtcataatatcatccttccatttatgtatatacatctgtatgcaaataataaagagccttaagttataagctgccactagcttaaattctaagatgtgcatgccgatgttgttatatttaggctagcagtatcatctataactcaagactatgaaaaatagtatatcacaaaattctgaattttcagataaagaaattggcaatttttcaaacatattgttacaatacacttttattttatcttcatttttaaaatccattaatacaatagaagaaagacattcaaatgcttaccaaaaaggtacattatttgttaggagcgtatcagcacttacatatcatcaacacaattgacaatataatagaagatactgataataagtgttaaaacaacagatgttaggtagtgaacaaatgatggaaagtaaatccatagatccaagaatcgttagaaccaaacaattgcttgtcgatgcttttcttaaaatttctagagaaaagaaattatctcaaattacagttaaagatatcactgatattgctacgctaaatcgtgcaacattttacgctcatttcactgataaagaagacctcctagactacacattatctgtaaccattttaaaagacttgaatgataatttgagcatttctaatgtcattaatgaaaaggttctgcgtaatattttcatttcaattgcgagttatatcaaagatgctgcaaagtcttgcgaattaaatagtgaagcattttgcaacaaagcacatcaacgtattaataatgaattagaagatatttttgcgattatgttagaaaacagctatccggagcatcaacgagatatcattgtaaatagtgcgagttttttagcagctggtatctcaggcttagcattacattggtttaacacgagtcaagagacagccgatgtgtttatcgatcgcaaccttccatttttaattcatcatatagcacatttttaataaaacttggtatttagtcatgcatcttgaaatcactatgtgacttaggttcatacttgtacacacaataaaatttaacgtattacgattgattagccgtgtctaggacataaatcaacgtcctatactctacaatgtcatattagcagtcgttaactgaatgaaaataagcttgtcattaaaacatatagattttagtgacaagcatttttgtttttgcgtacttaaacaacacttcaggcaatatgttgtttaggcaacaaatgatatgtgcgtgtttattggcaaacgtacgacatagtagtatagtatgtctaaacaacatatgttgcatagttgatatgcgttgtttaaatactaagataggagggattgacgtgagcgagacagatgaacctcaggggtttgaacgcacgcataatatattaaatattaatcagagtagtctgggtgtagtgacatacattacaaataaattaaagtcgacgttgaagcaacacataataattgctcgtggtaaaaagcgaatcgactatcgactgtcgtataacttttacactacgtattatgataatgtagaaatcaagaaaatcgactgtgaatatacctatgctatgcccattgcaattttaataagacacacgatgtcattcgacaatgctcatttctttgctcagttacgtcatcctgtcttataaaacaacattgcagacatgtatatcaaacgacacttcaataacatcactttgccatcgtactactagtaaaatcgtgtctcaaatcccttattttaattccaaaaatctgctggtcaaaagaccgagaaactaaaaacattacttaatgtgttgataaattaccatataaaaataatctcaaaatatatcaacacttgattctaaggaggatatgacaatatgaaaattttagatagaattaatgaacttgcaaataaagaaaaagtacaaccacttactgtagctgaaaaacaagaacaacatgcattgcgtcaagactacttaagcatgatccgaggacaagtattaacaacattttccacaataaaagtggttgatccaatcggtcaggatgtcacaccagataaagtttatgatcttcgccaacaatacggttatattcaaaattaatatttgctcacgaggtattgcacttaaggtgccaactgacctcataaacaaagcccatactgattgaagacactaatgtgtcgcaccatggtgcacattacgcttcatctctgtatgggctttttatttattcttttgagaatttcattttagcagaccaaaaaattaaaatggtgtccatcaagatctttgaacattgctccataaaacccttggcttactgttggttcttgaacgactgtgccacccgcttctttcactttattcaccaactggtcaacttcttcatttgtgttcacacctagagaaatcatcacttcatttggttcagtattaaggctttgctgacttacattttgaaaatgcttgttttctattaaaattacggttgtttgacctatttgaatgccgaccattttatctaacatttgtgggtttctatttattttaaatcctaacgctttataaaactgtgcgctcttttctaaatcttgcacatgcaaattaaaccacattgattgaatcatgattgcaccccattcattacttattatagttttggactttaagccaatcacttaatgataatcttgttggatttatttcagccattaattcaaagtctacttcataacctttttcttccaaccattgcttttctgcaacaccactaacaaattctccttctataacagtagatttacctgtcacttcactaaaaattgttgctgcttcacttaatgtaacttcatcggaaccaatctctattgattgatgcgtaaagctttgtggatgtgcaaaaatatacgatgcaattttagctatatcaatagaagaaatcattgtgaattttatattcggattaataaattctggtaatgtaatacgttcatcttcgactttagcaatgcgtaaaaaattatccataaagaatgatggtttgataactgttgcatttatattagattccattaatctattttctatttttgctagtacttcaaagtgtgggccagttcgatttcgattaacccctcccgcagtactatacacaatatgttgaatattttcttgctcagctatttcaattatcttcataccttgtcttaattcttcgctaacatcatctttaacgattggctgaatactgtataagccatacttacctttcatcgctgattgcaaactaacattatcactcagatcaccttcaacgattgataaatgcggatgtcctatgtctgaaagtttacgattattcttatttctagttaatgcacttacataccatccatcctctaacaactgttttacaactgcattaccttgcttccctgttgcgcctattactaaaatatctttcattttagatccactcctctttttatcttaaaaaccaatagtcctctttttcaccttttaaatacgtatatggttctggtgtttgtccatttcctttaatattgtcgtttattacatctctgacatcccatactaaatgaataaatcgttgtaattgatgactaaaaatgcctagtggcgctgtcatagctaatactttttccacatcttctgtagtgacattcagtttttcagcaatcatttgaaccgataaggtagatgcttcgaaatgtgcttgcaactcttcagctgtgatgcgtctttgctctttatttaaagacattatcaacactcttttcttttatgatatttaatagttattgcaaattcattgctaactttcttaacacgttttataataaacggagagttatccgtttgtcaattttagagaattttaagtaggtgtaatcatgcgaaaagatgcaaaagagaataggcaacgaattgaagaaatagcgcacaaactttttgatgaagaaggcgttgaaaacattagtatgaatcgtattgctaaagaactaggtatcggtatggggacattgtatcgacatttcaaagataaaagcgatttatgctactacgtcatacaaagagaccttgatatttttatcactcattttaagcaaattaaagatgactatcattctaattatgaggttatgcaagtgtcgttagattatcttttacaatttaaaatcgataataaggcactactgcaatgtattgaagcaggcaacaataaattacgtttttaccaaagcgcattttatcaagaattatttgatttttattatgacttatttaaaagcgatgacgacacttacacgaagttcaaaacagatatgctgttgcaatcattatcaactagtgtatttgccttccaaatagagcatcgccatatttcaattgaagcgtacagaaattatttattaaacatttatttagatgaggtgggacgtaatgactaaaattgtgttaatcacaggaggcaataaagggttaggctatgcaagtgcagaggcacttaaagcattgggttacaaagtttatataggttctcggaatgatgtaagaggacaacaagcatcacaaaaattaggtgttcattatgtacaattagatgttacaagtgactactcagtcaaaaatgcttataacatgattgctgaaaaagaaggccgtcttgatatcctcattaacaatgcaggtatatctggtcaattttcagcaccttccaaattgacacctcgtgacgttgaagaagtatatcaaacgaatgtattcggtatcgtacgaatgatgaatacattcgtccctctcttagaaaaatctgaacaacctgttgtcgtcaacgtatcaagtggtttaggttcatttggaatggttacaaaccccgaaacagctgaatctaaagtgaattcattagcttattgttcgtctaaatcggcagtaacaatgctaacgctacaatacgctaaaggattacctaacatgcaaatcaatgctgctgatccaggcgctacaaatactgatttagttggtgattttagtaataattccaaacacgtttctgaaggaatcaagccaatcattcaattagcaacgattggtgcagatggcccaacaggtacatttattaatggcgatggagagatgccttggtagatcaattttatgttacaaacattgaaattagaggtatataaaaaatgcttctgcaatagatgcaataaacatgcaatacaatatggaggcgaagtaaatgaaaagtattacgtttgaagaacattatgtcattgaagatattcaaaaagaaacgatgaatgcgatatcagcagatcctaaaggtgtaccgatgaaagtaatgttagaaggccttgaaaaaaagacaggttttacaaatgccgacgaattatcacatcatgatgaacgtatccaatttatgaataatcaagacgttcaaattcaagtcttatcttatggaaatggttctccttcaaatttggttggtcagaaagccattgaattatgtcaaaaagcaaatgatcaattggcaaactatattgcacaatatcccaatcgctttgtaggctttgcaactttacctatcaatgagcctgaagccgcagcgcgagaattcgaacgttgcatcaatgatttaggattcaaaggtgcgctcattatgggacgtgcacaagatggttttcttgatcaagacaaatatgacattattttcaaaacagctgaaaatttagacgtaccgatttatctacatcccgcgccagttaacagtgacatttatcaatcatactataaaggaaattatcctgaagtaactgcggcaacatttgcttgttttggttatggttggcacattgatgtcggcattcatgcaatacatctagtattatctggtatttttgatcgttatccaaagttaaatatgattattggacattggggtgagtttatcccattcttcttagaacgtatggatgaagctttattcgctgaacatttgaaccaccctgtaagctattactttaaaaataatttttatatcacaccgagtggcatgttaacgaagccacagtttgatttagtcaagaaagaagtaggtattgatagaattctttatgctgctgattatccatatattgagcctgaaaaattaggtgtatttttagatgaactgggtttaacagatgaagaaaaagagaaaataagttatacaaatggtgctaaattattaggtttatcacctaacaattaacaaatggaggtcattgaatatggaaactttagaattacaaggcgctaaattacgataccaccaagtcggacaaggacccgtgctcatctttattcctggtgcaaacggtaccggagacatttttctgcctcttgcagaacagttaaaagaccattttactgttgtagccgttgatcgtcgtgattatggagaaagcgagttaactgaaccactccctgattccgcttcaaaccctgacagtgattatcgtgtcaaacgcgacgcacaggacattgccgaacttgcaaagtcattaagtgatgaacctgtctatatattaggttcaagttcaggttcaatcgttgcgatgcatgtgttaaaagattaccctgaagtcgttaaaaagattgcatttcacgaaccaccaattaatacatttttaccagacagtacttattggaaagataaaaatgatgacattgtgcatcaaattttaacagaaggcttagaaaaaggcatgaaaacatttggcgaaacattaaatatcgcaccaattgatgcaaaaatgatgtctcaacctgctgatactgaagaaggacgtatagaacagtacaaacgtacgatgttctggttagaatttgaaattagacaatatacgcattcaaatattactttggatgatttcacaaaatacagcgataaaatcaccctactaaatgggacagattctagaggctccttcccacaagatgttaacttttatataaataaagaaactggcatacctattgtagatattccaggcggtcacttaggttatattcaaaaacctgaaggctttgctgatgtattattaaatatgtggggttaattgattgttctctaataaaacagcttggacagttttcaaattatatttgatggctgaccaagcttatttttatttacgcttaaacgttcaaatcaactcgttattatacatgaaggcatgttaaccattctcttccactgaaaacactactgttccaaacattgatagtcttcttttgaaataccctttccgataagcaccaaatattctggcactttttttgaaaatgctacaggtgttaattcatattgtccttgtgtaaattgaatgagatacgtatgtgcggtgtcttcaaatgtcataaaccctttcaacctataaatatgagacggaaggcatgctaaacgttttataaactctgctttagtacatttgactggtgattgcacaaattgatgattaatcatttgatgtaaagacttatgtttattgtcagaagttgctgtcatttgtctaactgatattggcaaagtgacgctgccatgcataccgacttgtatatcggcctctgggttaataacttctaaatctttcaatagtttgctcgttgtttcaacatctgctgaatctattttattaacaaataagacagaacaatatgctaattgctcataaaataagccttggatgtctttagggaatgatttaatgtgtttatacatgcttgcgtctattacaccaatcatatgtgtaattgttgtaaacggagctaaaataggcgttaaacaagcatctaagacagagaccggttctgcaatcccactacattcaataaatacaatgtctggttgctcttttaaatataattgatgtaactgttctgatacatctgctttcattgcacaacagatacacccctctgtcagttcacttaaaggtatgtcttcagatactaaggcaccatcaacactcattttcccaaattcattcatgatgactgctggtttcagcgattcctttaatgattcagcgagcaaatgatttaagacagtcgttttaccgccacctaaaaacccacctataataactattttcatctgcgactctcctcttatacttcatatgaatagcatattccaagatagatctcctattgactgacatgactctatattcagttatagttcattttttttaaataatcagcattactattttaacaatgatgcctacaccaataactaaagacaatgatgtcaccatttgctttccaattaattttagtgctgactgaccacctaaatgtttcaaaagcatcgtcattgtgaccgagcacgctgtaaatgttgaactaaaaaacacaagtagtagtaactgtgttgctgtcattccttgtaataaggcgccctgatgcaaattaaacaagagcatgccgtcttttcgaatcattgaaaataaaatccctggtgacaattctgacgagatgcctaataacgataatataggtgtaaatatttgtgataaaacattcaaaattggcgttagtgataaaatactaacaataagacagattgtgataaaaataggtagcgcttgaacgataaacatttgtatattttgccacatttgtagcaacatttgacgtatatttggcatatgtaattgcctatcataaggtagcggaacgctaagttgttgatcattctttttcaaccatatcctattatgtaagatgccacctaaaagtactaatattaagtacggcataaatagccatgactttccagctacactaaaaatagataatgtcgcacctatttgataactacaagaactaccaaagcttattaaactcatacactgtgtcttcgtgcaggtatggcattggtgtgctgcttgtgaaatagctgctgcattacatccaaacccttctaatagtggcacgatatcattaccttgtaatcctatccataacattgacggttcaattgcccatatcatccatgatttgagtcctgtttgatcaattatagcagttgataaactaatcaatattacaaccggcaatgcccatacgagcgaatatgttccaagtgatagcacaccataatcaccaaataatatatgctgtaatatatcgtgattgagcaatgttgtttgagttaaatattctatccatgctgacacatactgattttgaaaccaatctgaaaattgataagcgataccgattggcaatgcaaacattaaaaatatcaacaaccaggctaaaaatgtcgcacttattttaggtcttaaatgtcgtcgctcatgttgaaatagtgtcaattgttctatcacatgttcactcgctataggcgaagaaactacactttctgccaatgaaatatctaatttctgttttatgattaataatcttaatttcgctttttctgttgcggtaagtttatccgcatgactaataaccaaataatgaggttcattaggtatgggcgtataatgcccagttctcatatcatatttcacttctaacatgtgcatgacacttcacaacatgaataatcatctaaatacatttgatttttttgataattttcaatgacatcttgtttagctggtaagccttcccgctgtgttaaaagatgtgcaagtactgcaaatcgcgctctaaatttatagatatagcataatttggcattatcattttcaactgttgcaccaatcataaaaatattcggataacgtgtcgattcatcatgtgttgttaatttaatatcttgatttgttgtcacaaataattgttgaacgattggattttttgttgcatcaaagccagttgctagtattggttcatgaggtgtaagcacactttgtccgctatcaaaactgatatgatactgtccattgttaaaatcaatatctttaactgtataatgtacattcatttcgatgcgagcaccttgcttaatgacattacctagtcgctgacgtgtataaggtgacaatctaacactaggatcagcatccggatcatttaaaccggttgtgctagtataaagtgcgatgtcagagccattttttgcaagttgatatgcagcatcaaagccactttcattacctccgataaccacatattgccccttattaaagttatcaaagtcttcaatttcactataatgaataccatatttaaatggctttttagggaaattataatcacctgttgcgacaaagatataatccgcgtgatatatctctgttgtcgttgcaatcgtataatatgcatcatctacagatatatttgtgacaactgtattttcaaagatattcagctcgtaatggttggcaaccacttgtaaatattcagcatatgtttctccggaaatatgttcttcattaaatgtaaatgctggtgaagtatccatggaaattgcattcatatcaggcatgccaaatccattagacgtaaatgatggcgtgatcgtacgggtcgatttcggccaatgtttaaatgaatgtcctactgttcctttttctaaaataatgacatctgttataccgaaatcttttaaggtaatggccatacctatacctgcagcaccggcaccgataatagccactttatgatgttgcatattaacactccctcaatgatctatttcaagttattgtttttgattataaatcgtaataattacgatttataaagtatagacctatccttgagaaatttcaatattaaaagaaaaacttccgttattgtagagaattcatctacatttcggaagttggtatgtgtctttttttaaaatttaaggctgctacgtttagttcaaatgattatgaatgacatttcatggtatcatccagcctcagtacttggagataacattttggcggtgagacagaaatcatatttttacaaaatttatttcgtcgtcccaccccaataaagaaaaagtatttctttattgttgtgtaacttctccacgttgtatttcactatccaaattttgtttcatattttcaaacaactcttgaaatctaacctcatcttgatcagaataacctttaaaaataactgaatctatattttcctcgttaaaataataaatttcatcttctacaacaccaatcggatatttacatgcagaatagtcaaacatatacttttgattttcaatttctacaattggtcctctattaataatcattaacttttgcgaaccttcttttaaataaataatgcttcctattgtttccatttattttcctcctttgtcaccgtctcaatttcaacattccttcgcatttccaagtcaatcatctcttcttccactttacgaatgccatgttgaatttgctgttgctgctcgtataacgcttccgttgaacgtcgtttcgcaaaatgaaattcatcgcggaactgttccatacgactagccatattgctactataataacgctcacctaaatgttgatataattgatctatcgaatgattaagcgcatcactttcatctatcaatgctttaacctctcgcttttcatcatataagtcatccatttgctcatgtttcgctgtgattattttattgatttcatccagtttattcgacatcatttcaccacgttttaatttttaccaatttcattaccaatcattacgtcagtttggtcaaaagcctcaccaactttttgtatattatcgctcgcagttcgtattgcttcagcaacagattgattcttactcatcaaatcatctatcacactatgagcattattatttccacttactgttgtactttcatctttatccggtttcgacacattattacatgtttcaacagcgcttttaatagatgatgatgcactattggtcttaaaaatatcactttgaactgtactcatcatttacacctctctccatttaaattattttaaaattattagaaactgtatcaatatatgatattcaaacattcaattatacttaaatattgttttatgattatattcaaaattattgtatcaataaatatgtatcattcctagaattttattgaacaaaaagttataaaatcacttttattgtaactcaaccttgttttacattacagaaattaacaatagcgattaaaattttattttccaacaataaaaacgcacaaatatttttattgaggcagctgtatcgcttctcattgtaaaaatatctgtgcatattatctatttatctcaatctaacgtcttaactaacttgttgtatcttgtaaaatcttatccatagaatgcgcaacactatcacggtacatctcaccaaatttcaataaatggaccatcaataaatataaacgataaaattcaagtctataggatgcaccttttgcgagtggataatgtttattatacgcatcataaaattcgctcgtaaaaccaccaaataccgttgtaataccgatatcgaattctctgtcaccatataatggcgctggatcaaataacgccggacgaccatcttgtaagaacatataattaccaccccataggtcaccatgtaataaagacggtttactttgatgcttttctaattccgccacaatttgacgtcgcactttgtcatatactttgatatcgttggcatcccatagccctctatttagcaactcatctttcaaatggtccaagcgtttgtcgacaaaaatggtacaccaatcgtcttgccaatgattatcaaaagaaatatcgccaccttcataaggtaatgagaagccaaatttgccttcttcttgttgctgactgtgtaattgagctacgagttgccctaattggcgttgactccctgaagccccttcttctaaatacgtcatcactaaatacgcatcaccgttaacctcgccacttgcaattactctaggtgccgtgatacctgcacgttcaaattcatttaaacctgcaatttctgcagcataaaatgattctttacgtccacgttggacaagtaagaaaaatgtatccgtatctgtttcgactcgatatgcttcgtttacatcaccaccactcactggtgaaatctctttaatatcttttaaaggtaaatgctctaaccattgttcattcatacaaacaccttccaatctacttactttatactataatattgcctaattaggatgatttaatcttaaaaacgttattcaaacttgcgtcaattttcaaaactttttagttttaactaggaaattatgtatggaaatgctagtctattaaaagaatatatttcacatatattaagttgaggatagtaagcctcaaatataatgaaataggagcatactcatgtacaaattaattaaacctttcttattcaaaatcgaacccgaaaaagcacacggactaactatcgatgcattaaaaacgttacaaaagtttccggttttattcccagtcgtcgataaactatttacttataagaatccaacgttatcacaaacgatacaaggtaatacgtacgacaatccaattggcttagcagctggtttcgacaaatcttgcgaagtaccaaaagcattggaacaccttggattcggtgctttagaattaggtggtatcacacctaaacctcaaccgggtaaccctcaaccacgcatgtttagattattagaagatgacgccttgataaatcgaatgggcttcaataatattggtatgaacaaagcactaagtcatttgcgtaaaaatgcttatcaagtacctgttggtatcaatgttggtgtgaataaaatgacaccttatgaagcgcgttatcaagattatataaaggttattgatacgtttaaacacgacgtttcatttttcacagtcaacatcagttctccaaatactgaaaatcttcaaaacttccatgataaagatgaattttcaatgttatgccaagctttaacagcatttaaaaaacaacatgatgtaacagtgccaatttatttaaaactaacgtctgatatggatttcgatggcttaaaagcactattaccagcgattactgagacatttgacggtatcatcttagcaaacacaacgcgacaacgagatggtttaacttctgctaataaagtcgaagaaggcggtttgagtggtcgtccattatttgaacgtaatttaaaattgattaagtatgcttatcagcaaacaaatggtgaatttttaattataggtacaggcggcgtattcagtactgaagatgcaatcaaaatgatgcgtcacggtgcgtcacttattcaaatttattcatcacttgttattgaaggcccaggtttaactaagaaaatgaacaaaggcatcgcacgttacttaaaagatcatcattttgacaatgtcagtgatattataggactagatgcctaatccaacatagtcaaataatactttaaaacttgctgaatcgtcttattaaaattatgatataactcaagaagatatatttatcaccatttttcaaaataatggcttaaatatcacatatcattaaatatagcgttttataacggaggcgtttgttatgactaaagaaacagataataaaaaaacagtagcgacttctgacaacaaagacacacagcaacaaaatcaacctgaagaagatgaacgtcaaggtttgaatggttatcgtaaaacagatcttgatttagaaatcgagcaagagctacgtgaaatgatgaaaacaggagaaaatgaaacgaaaaatgactataaaaagtttaaagtgttttcacttatttcaacacttgtcattgtcattttagcaattataagatttgttcataaaatgatgtaattagagtgagacattgttttatgtctcaggatccagttattcattatatctacaatatttacgattatataaataacccgagattttagtatgattcatttcactaaaatctcgggtttctatttgataatttttaatgggatatggcatgtatacgttcttgccttttatctcatttccaatgattaatctggatattgttctaaaaatgctttcgcttctttattaactgttttaaaatcaataccttgttgcatcgctgcaaagacacatccacaataacactgcctaaagatattatagtcattacacatttctatggaacgctcataacctttacttttcttaaaatcacttggcaaatagttcacatcgtatattttttggacatccataccaagttcattgattaattgtgcgttctttttaggtgataatgtgattgcactgccaaaataatcatagccatgttctacagctgctttcgctacaatatccaaacgcatttcaaaacaagcggtacaacgtaagccgccttctttttcatcagctaattctttatccttcaccattttcacaaacttatgcggttcataaggtgcttcaatatacttcacattcgcaccagtcttgcgattaaaatcttccacaaattgttcttgcactttagcacgtcgtaagtactcatttttcggatgaatatttgaattcgcgaaataaattgcaatgtctgcatattgtgttaaaaactctaatgtatatgtactacaaggtgcacaacaactatgcaataagattttaggtctgattgcttctctttcccactgcccgattaatttcttcaacaccttgtcataattaattttttgatttttcattttactgataataggttcagcattaatcatgatttaacctcccacatttaatcattaacttctattatatatgattcatattaaatgtcagtcaaaaaagttagaaattcattttaatgcatttatatttcgaaaatcccttatgtatctaaaagcattttttaaacttgaattttaaaacactaaacaacacatacgtctctgtgtcattttcattttttgtatgtcatatatatgtttacttcatttaaatcaatttcatcttataatttatcgtgtattttacaaaagattgacttcaattcatcgtaaaagttatacttttgccattttttaatgtaacatggtgttagtaataaaaataatacattgaggtgttttacatgacagcattattcccttatatcgcttttgaaaattcaaaagaagcccttgcatattacgaagaagtatttggtgcaactgacgttaaacgtttagaagttggcgaagaacaagcgtcacattttggtatgactaaggaagaagcgcaagaagcaactatgcatgctgaatttgaagtgcttggcgtaaaagtgttatgttctgattcttttggtcgcgctgacaaaattaataatggcatatcattattaattgattatgatgttaacaataaggaagatgctgataaagttgaagcattctatgagcaaattaaagatcattcttcaattgaaatagaattaccgtttgctgaccaattctggggtggcaaaatgggcgtctttaccgataaatacggtgttcgttggatgttacatggtcaagactatactgcaatccaacaataatgttattgataaagatatcatttaataagcttatgttatttagcaaggcaagccactctcgattcatggcttgccttattttattgtatatttttaattatcgttgctggcccttgattgacaatcgtattaaaatgccttattaagtcaactttgtctatacggtttggatcttctacccaatgtcttataaaagacaatcccgcacctgaaacataactcatgaaataagaaaatggtataccattaatttgatcattttcatttttataacgttgtaaatgacacataattaaatcataaagtttttcgtggatatttgaatctttacccatacgaaacatcaattgataaaatgcgatgtctttttctatcatttctattaaaacggtcataatttgatgtatgttatccgtggataacttaactgctccatttaacttctcatcatgaatgaagtctcttatttcctccaactgctggtcctctaatttttcaagcaaatcatacttatcataataatgcgtataaaatgtactacggttaacatcagctaaatctgcaatttgttgcacagtaatctcttctaattggtgttgatgtaaaagttcaataaatgcatttctcattgcaacttgtgattttctaatacgtcgatctatagtcatttatatcaagtcctccccaatgattataaacgttatgttcattatcccacaaatctccaacattgatgattggcacacaatgtttacctgtttaatataggtgatacaaacaaacagaaaaaggtgataacaatgaaccaacatttactaggaaatccaaaattaactgtaactcatgtcaatgaagttaaagccggtattaaccacatcgttgtcgacagtgttcaatatggaaatcaagaaatgattatggaaaaagatgtcactgtggaaatgcgcgatggcgaaaaattatatattaatattttcagaccaaataaagatggcaaattccctgtagttatgtctgcagatacttacggtaaagataataagcctaaaatcacaaatatgggtgccctttggccaacattaggtaccattccgacatctagttttacacctgaagaatcaccagacccaggattttgggtgccaaatgattatgttgtagttaaagttgcattacgcggtagtgacaaatccaaaggcgtcttatctccatggtcaaaaagagaagcggaagattattacgaagtgattgaatgggcagcaaatcagtcatggagtaatggaaatatcgggacaaatggtgtttcttatcttgcggtgactcaatggtgggtcgcatcattaaatccaccacatttaaaagcaatgattccttgggaaggcttaaatgatatgtatagagaagtagcctttcacggaggtataccagatactggcttttatcgtttctggactcaaggtatttttgcgagatggacagataatccaaatatcgaagatttgattcaagcacaacaagaacatcctctgttcgatgatttttggaaacagcgtcaagtgccattatcacaaattaaaacacctctactaacatgtgctagttggtctacacaaggtttgcacaaccgtggctcttttgaaggatttaaacaagctgcatctgaagaaaaatggctatatgtgcatggacgtaaagagtgggaaagttactacgctagagaaaatctcgaacgccaaaaatcattctttgatttttaccttaaagaagaaaataacgattggaaagatacgcctcatgtcatttatgaagttagagatcaattttataaaggcgaattcaaatcagcgtcagcgttccctttacctaacgcagaatatacaccattgtatttgaatgctgaaaatcacacattgaatcatgcaaagattagtagcgcgcatgtcgcacaatatgactctgaagataaacaacaagatgtaagttttaaatatacgtttgacaaagatactgagttagttggaaacatgaacttaaaactatgggtaagcactaaagactcagatgatatggatttatttgcaggtattaaaaagttagatcgtcgtggtaatgaagttaacttccctgattttaatcatattgaaaatggtcaagtagctactggttggttacgcgtatcacatcgtgaattagatcaagaaaaatcctcaatcgcgcaaccttggcataaacatgaaacagaattaaagttgtcacaagatgagattgtacctgttgaaatcgaattgttaccttcaggcacgctatttaaacaaggcgaaacattggaagttgttgtaaagggtagtgaaattgtaattggtaatagtactcctggcatgaaaacacgttatgaacatgaagaaaccgtaaataaaggcatgcacatgatttatactggtggtaaatatgattcacaattaatcattcctatcgttaattgatatgcagcaattacggtcgcttttgattaaaagtgacatagtgataggactgtataacaagagaaagccacacgcttggaatcttaaaccaaggtgtggccctttttattattgatggctatttaattttataacactatcgtattttctttttcatgaatcatttcaataatgacattatcttcattcattactgctactttaggtgcatggtttttaatttcttcttcattcaactgtgcataagtcatgattatgactacatcgcctacttcaacaagtcttgacgctgcaccgtttaaacaaattttaccactacctctttcaccagctattacgtatgtttcaaaacgtgcaccattattattattcacgatggctactttttcatttggcaagatgtctaccgcttccaatatatctgaatcaatcgtaatgctacctacataatttaaatttgactcagtcactcttgctctatgaattttagcattcatcattgttcttatcactttattcagctccaattattatattatctattaaacgcgcttttgaaaatttaacagctaacgagataaatatgcgtccagttatttcgtgttgttctactaattgaggataactataaacagcaacttcttcaatgcgtccacttatatgtgattcaagatattcagtaaccctgtctataattactttactttgacgttcaccgtcttgatacaacgcttgtgctaatagcaaacttttacttaaatgtaccgcttcttgtcgttcttgctccgttaaataaacatttcttgaacttttcgccaaaccatctgcttctcgaacgatatcaataccaataatttcaacggcatgattgaagtcttttaccatttgctcgacaatagccaattgctgggcatcttttttaccaaaataagcataatccggcataacaatattaaatagcttattaactactgttaccaccccatcaaaatgccctggacgcttcgctccttctaacacatcagctaatgggcctactttgacatcaatacctaattcacctggatacatatcttctactgcaggatgaaaaacaatgtccgctcctacttctgatactaattctaaatctttatcaatttgtctcggataagcatcgaaatcttcgtttggaccaaattgtaatggattaacaaatacactcacaattgtaatatcatttgtactaactgattcgcgtaccatcgttaaatgtccatcatgtaaggcacccattgttgggataaaaccaatcgttgtgcctgagcgtttggctgctttaacaatgtgttgcatctcttttaccgtagtaatcagcttagtcattgttattaacctcattcataattttctttttatacgtatattcttctgatggaaatgcaccagatttaacttcttgatcgtattgttttaaaccatccacaccaacactaaaatcagcaaattgcttcacaaatttcgctttatgttcaacaccataatttaacatatcgtgataaaccaatacttgaccatctgtaccttttcctgcaccaataccaatgactggaattgttaagtgcttgctaatttcttctgctaaatcatttggaattgcttcaagtactaacgcaactgcaccagcttgttctacatttttcgcgtctaaaataagttgctccgctgcttctttcgttgcaccttgtaatttataccccataacgccaacactttgaggtgttaatcctaaatgtgcaacaacaggaataccaattgccgttgctttttcaataaatggtgtaatatgcgctccttctgctttaattgcatttgcattcgtctcctgataaagctttagagcatgatttaagtcttgtgtcatagagatgcctactgcaccaatcggcatatcaacaactacaaatgtatttggtgcgcctcttcttactgcacgaccgtgatgaatcatatctgctaacgtcacttgtacggtactttcataacctaatacagtcataccaagtgaatccccaacaagaatcatatcaatacccgctgcttccacttgtttagcacttggaaaatcataagctgttaccatagaaattttagtttgcttttgtttcatatctattaattgacttactgttttcaatgttattcaacctctttttgcagtattattagaaatagtataatgaatcttttatagaaaggaaagaagaagatgttatcagttgcgattatcggcccaggcgctgtcggtacaactattgcctatgaattacaacaatcattgcctcatacaacgcttatcgggagacacgccaaaacaataacatattatactgtaccacatgcacctgcacaagatattgttgtgaaaggttatgaagatgtcacaaacacatttgatgttattattattgcagtcaaaacacatcaacttgatgcagttattcctcatttaactcatcttgcacatgaggacacgctcatcattttagcccaaaatggttatggtcaactcgaacatatttcatttaaaaacgtatgccaagcagttgtctatataagtggtcaaaagaaaggcgatgttgttacgcacttcagagattatcaattacgtatacaagataatgcattaactcgacaatttagagatttggtccaagacagtcaaatcgacattgtattagaagcaaatattcaacaagctatttggtataaattgttagttaacttgggcattaattctatcacagcactcggtagacagaccgttgcaatcatgcataatcctgaaatacgtacactgtgtagacagctattactagatggttgtcgtgttgcacaggcagaggggttaaacttttcagaacaaactgtcgatactattatgactatatatcaaggttatcccgacgaaatgggaacgagcatgtattacgacattgcgcatcagcaacctcttgaagtcgaagcgattcaaggctttatttatcgacgtgcacgtgaacacaatcttgacaccccatatcttgatactatttatagctttttacgcgcgtatcaacaaaatatgtaagcacatatataatataaaaagaccttaacgatgcatttagaaccacctgttcctaatatcgctaaggtcttttaattatattagactattcagcttctctaatttcttctgccacatctttatagtctattttcgctttaacaaacgtctcgttatttaccgggaaatgttgttggaatgtttcaaagttttgtatctcaacgacaacgtcatccacttcaaagtcaagaacatgtccaccataagctctttcatcatccgcaaaatgtatatgaaaaccagcagaccctacgccatgaaataattctggtgtaaaaaatccaacaatggcaccacgaatatcttgtcttttttcctcaggttgtctgcgtgctgaatcaatcaaacgtgtatatggcggttgctgagcaggcatcattcgtacatgcatatgtttaaatgtgccataaattttaacagccgaaaataaattctcacttaacatttcatttttaatttgtgcaaatacatcatcttgtgataattgttgcaatggaaatgtcttactcgctttaaaattagtaatcgatgcatacggtactttctcatcgccttttaattctataaattctttatgctcgttagcatgatatgcctttccgtctaaaaatattacttcgccatcagaccctgttaacgttgcaatccctaaattcccatgttctaacaattcattaattgtagctgtgccttctagtaagccagccattaacgtacctaatgtaccatgttgatacaagacattcgtcattccaaaaccatctccctatagttattcctcgttgtcatgctctacttcgtgattaatgcagaactactttcctttatactcaatgacgcctcaacatttttattcatgtcactaaattttcacgagtcataatactttattcaattattattttacgcaaaagtattgcctctatcaatgcttgctaaaaaaatggacctatcagtgccacgtgttactgcaacactaatagatcctcttaccattaaaatatttctaattaatacttaaaataggcttagtcttctaataaatatttaattgaatcaaatgtatcttctaatgttttaacagatttatcgaacaacgcttgttcttcggcacttaatggcatttcataaattttaactgcgccatgttggttaactaatgttggtacacctaggtaaacgcctttgtgaccaccatattgaccatctaattgtatagaaacatttaagacattattttcattatttaaaatggcttttgaaatgcgcatcaatgctaatgcaataccatagtatgttgaccctttagcttggataatttcataagcagcgtcacgtgtattcacataaatttcttccgctttagcttcgctaccagtttgttcttttaatgtgtcatatactgaaatacctgctacatttgcttgtgaccaaactgcaagttcagtatcaccatgctcgccaataatactagcgtcaacacttgaaggtgcaacaccaagttcttggctaattaaatattgtaaacgtgcactgtccaatacagtacctgaaccgataacacgctctgctggtaatccagtatattcttttacaaatcttgttaaaatgtctacagggtttgccgcgattaagaaatatccatcaaagccactatccataacactcttaacgatgctcttcataatcttagtatttttttcaactaattgtaaacgtgtttcacctggcttttgaggtgcaccagctgtaataacaactaaatctgcatctttacagtcttcgtattcacctgctttcacatcaactggtgaaggactgtggactgtaccatggtttaaatcttgaacatctgcttttactttgtcttttgcaatgtcaataattacaaattcatcagcaacaccttgcgtaaccattgcaaaggcatagcttgatcctacagatccatctccgattaatacaacctttttaccaaatgttttcataattatgtctcctaacctaattgaatttattttacacgtgactacacgtaaaaatatctatactgaaattaaagattaacaattttattttattataatattatgctaccaaattacaaacataaaactgagatgtaagcggagtcaaattacactctatcgccaataaatattgatatctcaagctttagcacgtaatttgaaatttgtgacaatttttagcattctaaaattgcgtaacgacgctatttaaaggctttaacaaactattgagctttctatttttttcattttaaaaaggatggctattcgacttaaatgacttactatataacctcctattttccgccttaccctcatcatatttgatgcatcattttatagtcaaagaattacatttcatacaaactagccaatcagacataaacatgaaattgattttaaaaatataatgtgcaaaattgttagaaaattagcaaaaaatagtacttattcatttaatatctgttataatcagttttatcatttaaaaaatctatggatgttatcaagacaagtcattaatacgtaacataaagttgtgatttttcagaatttttagacaaaatattgattatttgtgctatgatataacatattaaaaaacaccgtatagaattgtttatgaatgtttgggaggaaagtttatgggaagttttttcaataaaatagcacgaaaagaggatccggctatctatcaaaataaagatggtcatttaaagcgtacacttcgggtgcgtgatttcttagctttaggtgtaggaacaattgtatcgacatctatctttacgctacctggcattgttgctgcagaacatgcaggaccggccgttgcgttatcattcttactcgctgctattgttgctggtttagttgcatttacttatgcagaaatggctgccgctatgccatttgcaggttcagcctattcttgggtcaatgtattatttggtgaattttttggatgggttgccggttgggctctattagctgaatattttatcgccgtagcctttgttgcatcaggattctcagcgaatttacgcggacttgtgaaaccaattggcatcgaattacctgcagcattatcaaatccatttggtacaaatggcggttttatcgatattattgctgctatcgttattttattaactgcattattactatcacgtggtatgtcggaagcagctcgtatggaaaatattttagttattttaaaagtattagctattattttatttgtcatcgtaggtttaacagcaataaatgttagtaactatgtgccatttattccagaacacaaagtaactgctacaggtgactttggtggatggcaaggcatatatgctggtgtttcaatgattttcttagcgtatatcggtttcgattctatcgcagcaaactcagcagaagcacttgatcctcaaaagacaatgcctagaggtattcttggttctttaagcgttgctatcgtattatttattgctgtagcacttgtgttagttggtatgttccattactcacaatacgcaaacaatgctgaacctgttggttgggctttacgtcaaagtggtcatggtgttgtagcagctattgttcaagctatctctgttatcggtatgtttacagcattaattggtatgatgttagcaggctcacgtttactttattcatttggacgtgacggcttattaccttcatggttaagccacttaaacgacaaacatttacctaatcgcgcactagttatacttactattattggtgttttaattggttctatgttcccattcgcatttttagcacaattaatttcagcaggtacacttgttgcatttatgttcgtttcattagcaatgtatcgtttgagaaagcgtgaaggtaaagatctaccaattcctgcatttaaattacctttatatcctgtgttaccagcaattacatttgttttagtattgctagtattctggggattaggattcgaagcgaaattatacactttaatttggtttattgttggtatcatcctatatttaagttatggacttagacattctaagaaaaatgacgtagctgaataccacccaccaaaataaaaaataaaaaaaatcatttcccatctgattaacatccagatgtggaaatgattttttattttatattaagataatcgctattaccaaccttgtccagatatgtcatattgatctaagttacctgcttccaaagcagtcagtgcatcttctatagtgtttaacgccgtgtctaattgctcatatgttattaccaatggcggttggaatcgcaacacatttcctgctacagctataataactacgccatgctcaaagcagtaattacaaattttaagtgccgcactggcatcacgtgttttgagttttttgtcggaaacaatatcaataccaatgctcagacctttacctctaacatcgcctacactattgtatttagatacccattgatccattcgtttcctaacatattcccctttttccgcactagcctgaagaagcgactgatcttcaatcatttgaattgtggctaatgcagcttcacaactaactggattagcacctgttgtaaataaatgtgctggtgcttctaaacaattcataatctctttgcgtccaacaattgctgacataggcataccacctgctaaggattttccgaaagtgattaaatcaggcgtaaaattaaaatgcgagactgaactccatgtacctgttctcccaaaaccttgttgaatatcatcgacagcgattaaaataccatgttcacgacaaatcttttctaacgcttcaaaataccctggaactggttctaaaagtccaccatcgccttgtatcgtttcaataacaatacatgctacttcgtcagcaggtacatacttcgcaaacatttcttttaagggtgctaaatattcttctactgaattagcttgtggctgctcgtacataccacgatatttatctggaaacggaatatgataaaaaccattcaataacggaccataatgtttgcgcatatttaaactaatagctgacatagacaatgagccaaaagttgaaccatgatatgcattagtgaaactaatgatataaggacgccctgtatatgctctggcaaatttaatgatgccatcatttgcgtctgatccggttaatccgaaggtcactcttttttcaaaatctccaggtgcaatctcacaaagcttcttagctaaacgtaccaacggttcatgatacatatatgctggtgtataatgaataaatttatcaacttgtgcctttatcgcttctgttacttctctaggtgcatgacctacgttttgagaactcgcactcgataacaaatcgatatatgtcttcccctcaatatcaaccaatgttgctccatatccatgatcaatcactaacggataatatttaatacgtcctgatttcgcaaaataatgttcatcctcttgaattaattgatgtgctttactcatatacattcccctcccattgacagtattaatgtgcaagcaaagtggcctctcttaaatcgattataaaatccgatttaaaatcctgctcaaataccgtcatgcctctatgaatactatccaatatactaataaaattcagatttgtaaatatattctgataattaagaattttatatcaatctactttgtttatgcgcataattttgttcgattagggaattgtttactatattccatttgactctgaggtgatacgaatgcgtttaaaagtattgttccatttcattgctgctattttcatatcattcatgttgctatggatgaccatgttgtttgacttaataagcaatcaatcacatttaaaagctttattattgaatttagattttctaattccttctgacaatacaccatatattctagaaataatatgtcacttactaattggtagcgtcatttattttgtatttgtgttgctgtttcatacttctaaaaggctttactatctatgttatatccctttatttttcttatttatagcattgtatccctttttagtatttattgcgcaacgtccaatttttcaatttagtgtgacagaattaatcggttggattattacacatattttctttatgtcattaatggcgttagtcatacctagaataaaataatatttttaattaaactgacaattatttttcacattttatacacttttcaaggtttatgacttgagaaatgttctcatttttatcatactggaggtgtattgaaaagttaaggagtggaaagtatgaataaagagcaattagaaaaaatgaaaaatggaaaaggctttattgccgcattagaccaaagtggtggtagtacaccaaaagcacttaaagaatatggtgtaaacgaagatcaatatagcaatgaagacgaaatgttccaacttgttcacgatatgcgtacacgtgtggtaacttcaccttcattctcaccagataaaattttgggtgctattcttttcgaacaaacaatggatcgcgaagtagaaagcaaatacactgcagattacttagctgataaaggtgttgttccgttcttaaaagtagacaaaggtcttgctgaagagcaaaatggtgttcaattaatgaaaccaatcgacaacttagacaatttattagaccgtgcaaacgaacgtcacatttttggtacaaaaatgcgttctaacattttagaattaaatgagcaaggtatcaaagacgttgttgaacaacaatttgaagttgctaaacaaattattgctaaaggtttagttccaattatcgaaccagaagttaatattaatgcaaaagacaaagctgaaattgaaaaagtattaaaagctgaacttaaaaaaggtttagatagcttaaatgctgatcaattagtaatgttgaaattaacaattcctactgaaccaaacttatacaaagagttagctgaacatcctaatgttgttcgtgtcgttgtattatcaggtggttacagcagagaaaaagcaaatgaattacttaaagataacgctgaacttatcgcaagtttctcacgtgcattagctagtgatttaagagctgatcaatctaaagaagaattcgataaagctttaggtgatgctgtagaatcaatctacgacgcatctgtaaacaaaaactaatttatacattaaactattttttgatataaactactaaaaaggactcatacatgtgctttaaaggcattgtgtatgagtcttttttgattaaagttgattttgccgtatgtattagattacgtaaaaaaatcggacagctgaaaaatctttaagatttctcagttgtccgattttaaatatagctattagaatttagttttcgtagtaacctaattctaagtcttttgaagtttgtttacggatttttctcattaatttttcgtcttcaattaatgattcaccgtatgatggaatcattttcttaattttaggtgcccattcagttttgtattcagggaagttacgttctaatacttctaacgcaactgaaactgaagttgaagcccctggtgattcacctaataatgcaattacagtgtggtcttgtgagttaaccacttctgtaccgaattggatgaatcctttaccgtgttcaggtgtatctttgataacttgtacacgtttaccagcagtgtataattgccaatcttcattacgtgcttctggatagaaagtacgtaagtggttcatacaaccttcttttgtcataattacttggtcaaatgagtatttaattaaaggtaagtttttaactgctgctgctaataaagttgtaatgttgtatgttttaacagacttgaataaatctaagttagaaccatttttcaagaatttaggtccaacattagcaaatggtccaaataataatgttctttgaccatcaatgtaacgcgtatctaaatgaggtacagtcattggtggtgtaccaggtggctctttaccataaactttggcatcgtgttgttcaataacttgtgggtttgtacaagctaagaattgaccactgatagggaatccacccaaatgtttactttcagggatacctgttttttgtaataatggaattgctccaccgccagcaccgatgaatacgtagtcagttacttgtttgaatttctcaccagttaggcgatttttaacagtaacttcccattgaccatttgataattgttcaaaatcaacaacttcatggttaaattgcactgtagcatttggatgtgcttcaatgcttttagccattttacgtgttaattcaccgaagtttacatctgtaccttcgtcaattttacttgccgccatgataccagggttatcttcacggcctttcatcatcaatggaatccattttttcattacttcgatgtcttcagtatattcgatattatcgaacatagggaaagctttcatcgcttcgtaacgatcttttaagaatttaacattgtttttacctctaacataactgatgtgtggtaatggattgataaattctcttgggttctcgatgctaccgcttttcactaagtgaccccagaattgttttgaaatctcaaactcttcgttaatcactttcgctttttcgatgtcgatagaaccatcaggttgtaaaactgtgtagttcaactcacataatgctgcatgacccgtaccagcattatttctttcgtttgaactttcgattgcaggacgatccaagcgttcgtaaacgtggatattccagtctggctcaatttcttttaacattgaaccaaatgttgtgctaagtacaccggctccaattaaaacgatgtctttactattagacttagccattggtttcacctctccaaaaattgtaaatgtgtatcatcaatatgaaagttacataaaactgacatatttctttaaaatatcaacgccattgataacttcctgttttaattgatacgctgtaacaaaatactatagttagtgcttacatgtatatgttaaagcaagcagtggtaaatgtaaattataattattcattaactttgcaatatattaaatcttttattcatagaagataaatatcaaatcaatcataattatttgacaacaaatagctaacgattgttttaatctacatttggcttatagcattttaaacctatactctattttgatacaatataagtgtaaaatcaatcataaaaaggatattcaatatctgcatccaagaaaaacattacaattacctttaatattgaaaattattttgaatcttgcacttataggtattgtaattatcgttctaacacatactgagtttcaacttaatgccggtgatagtaatgtgtttttattaaactgggatattcgaggtttaacatcttatattttctcattcttaatactggttgcgcttgtttctaaactaattttaatatttataactagacgacaaagaacatcataaataaacaagcagtccagtgcgtatcatcataccttacgcattggactgctttgctatgtttattgattgctatctttttgttgttgccatttttctatttcagcatctcgtagttcaacacgacgaattttacctgagtttgtttttggtaagtcgtcaacgaattcaatctctctcggatatttatatggtgcaacttcatttttaacaaattgttgtagttctttaactaacgtatcatcacccgcagtatggtcctgtaaaataacgaatgctttaacaatatttcctcgtatatcatgaggttttgctactacagcacattctttaacggctggatgattcgttaacgcatcttcaacttcaaaaggcccaatcgtatagcctgaactaataataatgtcatctcgacgtccttcaaaccagaaataaccatcatcatctacatgagctaagtcaccagtgatgtagtatttacctgtttgcgctttcgccgtacgttctggctctttataataccctttgaaaagtgctggcaaatcaagtggtactgcaatattccctttcgtattagcaggtacgctattcccctcatcatctactacagtgaccgaactacccggaatgcctttacccattgatccaatcctctgtggtgtatcttttaaaaagcctataagcaaggtactttcagtctggccatatccatctcttacagttaaattaaagtatttcttgaattgttcaactacttctcgatttagtggctcacctgcagaaacggcactatgtaaatgcgttaagtcataatcatttaagttctgtaatttagccatcatacgatattctgtcggtgtacaacataaaacattaatttgatatttttgaagcaattctaagtatgtttcaggactgaaccttccattaaatacaaaagcagttgcacctgaacctaatacagataagaaaggactccatacccatttttgccaacctggtgctgctgttgcccaaactaagtcatcttcattaatacataaccaatgttttggtgccatttgtaaatgtgcaaatccccatccatgacaatgtgtaacggctttaggattgccagttgtaccagatgtatatgacagaatcgccatatcatcacgcgtcgtatctgccatttctagtttgttacttgcgttttctttttcagcttcaagtgaaatccatccatctttttgaccggcaataacaaatttagttaacgcatcatattctttaattttttcaaattcaactgtgaatggctctagtgcaataactgcattaatttcaccatgtgtgatacggtattgtaaatctttagttcttagcatttcagaacatggaatgattgcaacacctaattttaaagcagcaatatataattcatacgtcgcaatagatcgtggcatcataatgagtactttatcgcctttagataaaccgtgcgatgctaaaacattacctactttattagactgttcaatgagctgttggtaagtgactgatatatcttcgccttcagtattatgatataaaattgcctttttatctggtatgtggctatatttttcgatttccgaaataatgttatatttttcaggcgcgaatagagctgacttttgcataactaacttcctttcatacatccacttttcctgtgatgaacattgtaattttataaatgaattatatacatcatacgcctatctttacagaattttcaattaaatagggttaaataccaaagtcctcgacactacactttgacatgacgtagcattcaaggactttcaaatgattgagggttgatatctcgggctagaccatatcagctaattcaatacgaatattgtatgataattcacgattaattatttttacatctgcacctttcgaagtgccacgatgcttgtgtgtatgcttgtactcagctgaattttgccaatgataaaatgcttgcctattttcccacagcgtaataatgatatagtgtctaccagctgttctaggtcttaaaaaccttaatgctttaaatccatcaacgttttttaaatgcttattacgtcgcaaaaatttttgctcgaatgtttcttcttgtccttcgttaatatataaatgatttaacacacataatgaatcatttgataaatcatttatcgcttctagcacatcgtaatatgcagtgtcattatttttttgtattgtgagacaatcatccagttcttctattacataacttctatattcatcataaattttcataataaatgccttcatttcatttatatttttggtcatattactttatatctattactaattcattcccgtatttattaattacaatcatagtttggcttctttttaaaagataagactttgtaaaaagtattaatatttcatgcaaatgggggacaggagtcgcccactatttttgtgtcttcaatttcatgatcattatttaacattagtcatgaaaatagccgacaacttcatctgtgaaatcaccggccttttattttagctaactttatttctgattttacgattttaattgatcatacagagaaagtgatctttttacaatttctaaaaactcatgatctatattggacatttgatgaaaataagacaaaatgttttctgttagcttctcttgttttgggaatgaatcatcttctttaatccaaatcgctaattcgcctaatggtgttttatcatctttaaatgtttgtatatattcgtaaaagctcatagtattccttctctcaatttacttatataaatcctaccacgaaagctttcaagaaaacacaattaaatgtctatttagtgaactttttaaggttgtgcactcttttaatgtctgccaattaggtcaattaatcatcacaatgtacaattaactctattttcagttcatatactcacacaccgtttttgaacaacacattaacttctcatttagataaaacgcaaaaaagcctggcaccaatacaatagatgccagactaagagtctactatataaatttatttagcgtatggttttacttcgattgcaccttcattttcatcatgaacaccatgcttataataatcaatatattgtggctctaaaggctttctgccacgtataatgtctgctgctttttcagctaacattaaaacaggtgcgtgtatattgccatttgtcgtacgtggcatagctgatgcatcaactacacgtaaattttccataccgtggactttcattgttaacgggtcaactactgccattggatctgaagcaggacccattttagcactacaagatgggtgtaatgctgtttcaccatctctacgaacccaatcaagaatttcttcgtctgtttgcacttctggtcctggtgaaatttctccaccattgaatggatccattgctttttgagataagatatttcttgctacacgaattgcttctacccattcttttttatcttcttctgttgataaataattaaagcggatacttggtttttcgaatggatctttagatttgattttcaagctaccacgagagtttgaatacattggtcctacgtgaacttgataaccatgtgcgaccgctgccttttgaccatcatatcttacagctattggtaagaaatggaacattaagttaggataatcaacttcgttatttgaacgtacaaatccgccaccttcaaaatggttagatgctgctgcacctgtacgtgtgaaaatccattgtaaaccaataaatggcatgcgcttgatatctaagcttggctgtaatgatacaggttccttacatttatgttgaatgtatacctctaagtgatcttcaaagttttcacccacaccaggtaaatgaacacgtggctcaatgccttttgattttaggaactctgaatcaccgataccagataattgtagtaattgtggcgtattgaatgccccaccagacaaaatgacttcattagcatcgatggtatgtagtttgccatttttcttatacgtaacaccagttgctcttctaccttcataatgaatttcagttacaaaggcacgtgtttcaacggttaagtttttacgcttcatcgctggatgtaaatatgctcttgaagctgacattcggcgaccacgatgtacttgactatcgaacggtccaaaaccttcttgtctaaatccattcacatcaggtgttttatgatagcctgcttcaacacctgcatcaaagaatgactggaataaaggattcgttgctggccctcgttttaacttaattggtccatcatggcctctaaatttatcataaggcgctgcaccgtatgttttttctaattttttaaaatacggtaaacagtgcgcaaaatcccaagtttccataccttctggttctgcccagccttcatagtccattggattaccacgttgataaatcatgccattaatcgaacttgatccacctaaaactttacctcgggcatgtgctactttacgaccgcccatatgtggttcttcatctgttgaataaatccaatcgtaaaatttattgcctgaagggaacattaacgcagcaggcatttggataaataaatcccaaaaataatcactgcgacccgcttctaatactaagacttctttatctttatcttcactcagacgattacctagtacagaacctgcactgcctcctccaatgatgacataatcatatgatttgtttttgttactcatcgttatgacctccaaagtttgttgtatttcaaagtgagtattgcatgaaatatttgttagtggctgattggttatcgttgaattgctaaacttagctaaccaaaacactcgcttttccttttacgattgttactaacagtaatgaaataatctatgattcattttgcgtttagtccaaattatcaatcaacatttcgccacttatacaaaacaaagtgagtgtcttgtgttcttacaatggcactcaccttatctaatttttatttgctaaaccaattcactaattgtggatttgtatttgttaaaatgtgttttgaaacaaggtactcttctaagccttctttgcctaattctctaccgatacctgattgtttgtatccaccccatggcgcttgtgcaaaatatggatggaaatcattaatccacaccgttccaagtttcaacttgttagcaacgcgttgtgcttttccaatatctttagaaaatacagcacctgctaaaccatatatagaatcattcgctaattgaatcgcttcttgttcagtttcaaagccttctacagtaacgacaggtccgaaaacctcttcttgtacaatacgcattgacgtatcacaatttgtaatgactgttggctcgaagaatagaccatcttttaaatcatctctatctggacgtttaccaccaacagcaattgttgcgccttctgctttagctacatccatataagattcgatcttattacgatgttctgttgaaatcactggtcccatttcagtatcagcatcaaaaccattacctaatttgatttttttcacgcgatcaataagtgcttgctcaaatttgtctttaatactgttttgtactaatattcttgatcctgctgaacaaacttgacctgcatggaaatatccaccatttaacgcttggtctactgccaattcaaaatcagcatcatcaaagataatgtttggatttttaccgccaagttccaaggcaatattcgtaacattattagcagcatttttcataatatgcttaccagtctcaatgccacctgtaaatgatacaaggtcaacctctttatgacctgacattacgtcaccaacttcagaacctgcacctagaataagattaattgttcctttagggaaaccaacttcttccattaattcaaaaacacgtattgttgttaatggtgtaatttcacttggtttcataactagtgaacaacccgtagcaagcgctggcgcaattttccatgatgcttgtaataacggataattccaaggtgtaatttgtgtaactacacctactggttctttaacaattttgctttctgtatctggaattggtgaatcaatcatttcgccaccgtctttatctgctaatccagcaaaatacataaacacattatgaatatcatccatatctgcatatgattcttctaacgtttttccagtatctaatgtttctaatcgtgctaacgcttcgcgatgttctttaatcttgtccgcgatggcacgtacttttttacctcttgtttcagcagtttcttgcgaccattcaccagactcaaacgcacgtcttgcagctaagattgcacgttctgcatcctcttttgtcccttcagaaaccgtaaatatcacttcttgattgtaaggattgataatatctcttgtatttttattcgcgctttcaacccactcaccatcaatatattgacgctgagataaatgttttaaaagttccattcaacaacctccgttaagtttgttaaatttttatttaacgaattttacaaacttatgttagcatagaaatgaaaaatgtgtcaatttacaaaacaactcaagaattaagttttgtaagttcgttagatttttatttaacgaaacatttaactttaatgctttaaatatttttaatgtctttttttagaaaaggttttataatgtattagtatttattttaacgtgaccaaaatgatgtacggaggtgcaatgatgactcgttctcagaacaaacagcaacaattagaacaagcaaaagatattgtaattaattcaattggacagacaatggatttgtatggcactaatagaagtgtaggaaacttatatggcacaatggtgtttgaaggcagtatgacgcttgatgaaatgcgtcatcaattgcaaatgagcaaaccaagtatgagtgctggcgttaagaaattgcaggaatttgatattgttaaacaacaatttacgagaggaagccgcaaacaacattttatcgccgagaaagactttttcatctttttccgaaactttttcactaaaaaattccagcgtgaaattgacatcaatgtcgaagcagtaaaagatgctcaagctattatcaattcattacttgaaagcagtgatttaactgaagctgaaacacaagaggcacaaaaaattaaatctcagcttgatcatacacatgtttattacgaatggttagaacagttaaccgaagcgattgaaagcggtgaaattttcaaatatttcccaattccagaacagccttctgattctgaaaattaaaattgactcaaacaacgacaatgatgattatgcatgataaaaacaatgcaataggtccacgaaataaacggtaatttctatctcaataaatagaaattaccgtttttgttttatatgacaatcaattatggaggtattttctagggctttcttagattcgttacattgcttcgccaatatatttcaattagctattctcgccctcacgtactctatcaataatattttgtatttgttcacgtttttcatattcattttctacaaaataaactaacggttcatctttgatagtaacccaaggtacaagtacatcaaaatctaattctttaaccatctctaaactttgaatagatttttctctatcacttgaacctaatataactgtacgccatctcttcccttcaaaacatataaaatctccagtaaataagtaacggtgatgaccatcatcccataaaaatagtgtcgtccctggtgtatgtccaggcgcgggaataacttctaaatccttatccaacattacacgattactaaattgtttttgaacagaaatcttatgtttcagtgcagccacatcattttcatgtataaagtaaggggcttcaacttgattagaacctcctatagattcatgatcatgattcatcaatacttttgaaacaccacctaatgatgcaatgtcttgttgggagtcacctaagtgtccggaatgatagataacaatattacctgtttcacgttttaaaataaaagatttaaatagaaatcgattatcaaaaggcagttccgaagtaggtgtcgcatataagttttttgtgatggattctaaactgtcatgtaatttggactgtttatttttaaattgattagtcattttatttcatccttcgattaatttgaattgtacatacgcagtaccctttatttaatttaataatcaatgagagtctttcaaacttcgatttagaatatgcttcatacaataaataagtacttggagcactaaaaaattaaatcttttagtacaacattaatgaaaacctaaaagttcatcctacaatgctactaaaaaaaggggaatggaacagaaatgatattttcacaaaattcatttcgtcgtcccagacccgctttgaattataaattatcgtcttgttcttcttctgatacttgaacgattcgcaatgaacgacgttcaacttcttttaatttttcagcacgcgtttcaagtttaattctatcgcgccctaaaatgattaaaaatgatatcatcatgaaaataaaaataacaattaatggcacacttgccagtattgaagcagttttcaatacttctaatgcacgttcaccaccaactagcatcaatgaaaatggcaataagcacaatgcaaatgcccagaataaacgattggcacgtaatggttcgcctaccacttttttctgagatgctgccgctaaaatatatgaacccgaatcaaatgttgttgctaagaataagaaagcagatactaagaatagtacaatcatcaatgatgggaatggtaaatgatgcaccacttcaataatggttgcctctgtaccatgtgtatttaaatattgtgttacattaaactgtccagaaatttgtaaatacacagcatagttaccaaaaataccaaagaataatacgcatccaagcgttccataaataattgttcctagcacgacttctttaaggcgtcgaccttttgaaattctagcgataaataaaccgataaatggcgcatatactaaccaccatgaccagtagaatattgtccagtcttgtgggaaattcgtttcttttcgacctttaataccaccgaatggttctaaccatgttgccatatgaaagaaatctctcaacatatttccgaaccctgtcactgtcgtttccataataaaaacagtcggtccaataataaatataaaggctaaaagtacaaaggatagccaaacgttgatatcacttaacttttgaataccttttttcaatcctgtatatgaactaatggcaaatataaccgtgattgttaataaaatggccgaacgtaaaatcatatttttaccatctaaaccagttaatctttctatgcctgcagaaattaatggcacacctaacgctagtgatgttgccgcaccacctagcaatccaaagataaataagatatctacaactttacctacaaatttatctgtttgaccttttaaaatcggacgacaagcttgactaattttatacaccggttgttttttaacaaatactaaataaccaattggtaatgctggtagaacataaatagcccaagcaattggcccccagtggaacataccatattgcgtcgcatattggagtgcttcatcactcatacttttcgcgccatttggtggaacttgatagtaaaaagcccattcaataacgccccagtataaaatatcagagcctatgcctgcacaaaacagcattgccgcccatgtaaatgtattaaattctggtttatcacttgctttaccaagtgtgacattaccatatttaccaaatgcgatatacattacaaagcaaaaaatcgccagccccataaataaatatatcgaaccaattgaatcagaaatggcactattaataccagtgatgatatcttcacttgcttttggaaaagccatcataggtataactgcaaaaagaagtacagctactgtccctataaaggtcgtccagtccataactttctcttttttcaattgtgctccccctaattattaattttatgaatcctgtttcgatttatctcaaaatgtaataattatattgattcacaaaattgacaataactaacatttaataataatgcaaatttcatacaatttgaaacttggcaattattgaatatttatataatttttcccgtaataaacaaaaccttaatagcgctaaaataacagtgttaagttacgatttaacgaatttaacaaattttactagaatggcatttaagaatatttatacgttattaacgaatatttatttattgtaaaacgctaccaaaaagttagacttccttcccactaaaataccacttttctctttcaacttttttaaaaaacggatatgcaacttttagtattggtatcaaaatgattgttaggtcatattctatcaatatatttttataaagaattgcttttattaactttcaattatgtacctaacctaaaaagaagccaaggcaacgaatgttaccttgacttctaatacatattcaactaactatatattcaatcatacgcgcatgcgagagtgattgttgtacatctataatgcgttgatttaaagaacctttatatggtaaatcaggtttgaataagtgttgtataaatagaccatctactaaaacgtcaatgtatgataataactctcgacgttctgtacaatcatttgctaaatattcatataaaaatccagtccatacccaaattgtctttgtatttccaaaacgtgctcgaaatgctttgacaagatttaatgtaatatccaaattacaaaatggttcgccacctaatagacttagcccagatatataatcatgatcgcaatcatctaatatttctgctaatatttcatcagtgtatttctcgccatatctgaacttttgtgaggctttgttataacatccaacacaattaaatggacatcctgatacataaacactgcatcttactccttcaccgtcaacaaagctatttgattctattttagcaatataaccttgtccttgtttaatgtctaaaagtatcattctttaggcgctttcatatgttttactcgtgcgcaaatttctttatgacggcctttaattactggacgttgaactggattgcctaggtaaccacatgttcgtttaacgacatcaactgttttaggattatcattgccacagttcgggcatttaaatcctttttcagttgcttcaaaatctccatcgtaatcacattcataacaatgatcaatcggaatatttgtacctaagtaaccaactttgtcataagagtagtcccataccgcttctagtgctttcaaattgtgttgcaatttcggatactcacaatagtgaatgaaaccaccactcgcataataaggataatctttttcaaaatctaacttttcaaaaggtgtaacatctttacgtacatcataatggaaagagttttgataatatcctttatctgtaatgtctttaatatctccaaatctctcttggtctaaacgacaaaaacgatccgttagcgattcactcggcgtactgtaaatactgaaccaaatgtcatataattctgtccatttcgtttgataacgtttcatttctttaagaatttcaagcgtaaatgcttttgcttcttgagatgtttcccagtctggaccatagaaaacagtagctgtttcatacaaccctatatagcccattgaaatcgttgcacgtttatttttaaataactcagcaacatcatctgtttcttttaatttatagttaaatgcgccacttttatataaaatcggtgcgttattcggtacagcatctttcaaacgatttatacgataaagtaatgcatcatgtaacacatcgatacgttcataaaagatttcccagaatttcgtcatattaccggcagattctaatgccattctaggtaaattaagtgtaacaacaccaagattacaacgaccattattttcaaaatgaccttccgcatctttccaacttggtaaaaatgaacgacaacccattggcgctttgaaatcacctaatatttctacgagtttgtcataatttaaaatatctggatacatacgtttcgttgaacactttaatgctagttgtttaatgtcatagttcggatcttgcggactaaagttggttccttttttaattgaaaatacaagtttcgggaaaatcgctgtcgtgcggtcttttcctaagcctttgatacgagtatttaagatagcttgttgaattttgcgacttaaatgatctgtacctaagccgaatcctaatgttacaaaaggtgtctgtccattagatgtatataaggtattaatttcatattctaaactttcaatcgcatcattgatgtctttagtgacttgttgatcaacataacgatcaatttcagattctttgacaaattgctttgcgatattcctatgttgttcttcattatgtcgtgcatatgtactaagtaattcgtcaacgcggtcaaccgtacagccaccatattgactgctagaaacattggctataatttgtacaagctgcgctgatgcagtttgtattgattttggtgaagttacattcgcgttgcctatttcaaatccattatgtagcatatttttagcatctattaaacaacagttagttaacggttggaatggatgataatctaagtcgtgaaaatgtatgtcccctctttgatgtgcatctgcaacgtgctttggtaataaatgatttaatgcgtaagatttagaaacgatacctgctgttaaatctctcattgttgaaaatgtatcactatctttgttagcattttcgttaacaatagcaggatctttagaaatcaaacccgttaatgcttcttcgatttgattcattttaccccttcttcctatatattgtgtctactcattacgttataccactatatatagtattttcaaatttttattagtctgttaactaaaacgtcacaaagttattaacatttagtgaaattcatatttctacacaattatttcattaatttttaaaattgtttaaagattcgtccgtcatttcgacatgtttatgcaactattatttcattttgcaacgtgaccatagtttctattttttcatacttaaatcgtcacaatgcccatcaacattgcaattactaacataacgatagcgaatccccaaatccaaaagaatgcatacttaatatacgtgcccatgtttgcctctgctaaaccaattgccaaccataaggctggtgaaaatgggctgacaaatgtacctataatattccctatgaccattgaataagctgttgatacagacggtacaccaaattgccctgctgtttgttcgacaatcggtaacacagcaaaataataagcgtctgtgctagttagtaaatctaatggtacgccaagtaaacctacaataatatgcaagtatggtcctacttctgcaggaatcactttgattaaattggtcgcaatcgctttaagcataccggtttcatttagtacacctaaaaacatacctgctgcaataatcactgcagccatcattaatgcattcggcgcatgcgctcttaatcgttccatttgttcatccactgatttaaaattaataacaagtgccaacgaaacacctatcatgaatgcaaattcaggtggcgcaatatttattaacatcgatagaataacagctaaagttaaagctgtattcacccattttatccatgattttgttcttgcacgtccttttacaggaaaccttacatcttgatctcgttcatatacttcaactaatttatgtacatctatatcttgtgtttgcggtaattcatttctctctattgcttttttgatacgtttctgttctttaaatccaagatataccgcaaacaacataacaagaatgaaacctattatttgaataggtattaatccataccataattcattgacacttttggcttttaacactgcagctacacgagccattggacctccccaaggtaccatgttcataatcgccgcgcttaatgctaatagtaaaatcaataaatatttattcatatttaacgctttatataaaggtaataatgcaggaatagaaagcaaaaatgttaccgcaccggccccatctaattgggctattgtgccaattaaagctgtcattgcacagacaatgacgacattgcctcgtgtcattaatattaagcgtttgacaagcggcttgaataaaccactatcgttcatgatgccaaagaaaataatggcaaagataaacataataacaacgttgatgacttgatctaaccctttagcaaaaaatccaaccaaatctgtcacactatatcctaaaatcattgcccctaagcaaggtatgattgtcatacctacaactggatttatctttttggcaatgagtaaacctacaattgaaataataataatgagccccattactgttaaccacatattatcactattcatattattttctccctccacttttaatacaatttacataatccccctctttaacttaaatattataattaatataattttttatatttaagttatctcattttatcaaaaaaatcttttttgcgtaactatcaatagtgaagtttgattttcctacttgataacatggcatgactaatccttgtatatcctgtcctgtatttcattttgatctatcatttttattattgctttctattgcacaaaaaatctggctaaaggtcgctatgatagtaacgacttcaaccagatttcaatttatccacctattttattaagtttgttctacgtatctttttctctattgtaatattcatatttaaaacgcatatcattatcgcttaaatccttcattattagactattcacaaagccgcccatgtcttaatttcaatgattaagcgttaaagttaaaataagaagacttaccttagacggttagacggtccgctattattatcttacatccaaccacgctaaaaattgagcttgtttgtcatgatttaaatattcttgtgacacaatttgtgacagtaactgttgcttttcgttatatgttatatcaagtacttttattttctgtcggcaagtatataaaaagtcgatatacgaactgtatgatggtggatataacgcctcaagctctgccataattgattttgtcaacttaggactcgcaccatcagttgatacactgatagttagcttgtcgcggtgtagtgcacttggaaatacaacattgccatttgatgcatctccaacattattaaaaagggcatgctcaggtaaggctttttttaccgcttcattgacacgtggctcattggttgctgcaataactagatacgcgtctacaatatcgcttggttcaaattctttttctttccatatgacgacaccgttatctaccatattttgaagtttttcagtgattgtcggactgatgaccgtcatatgttcaacgtattgatttaatgtttgtgcccgacgacttgcaacgacgcctccaccaactatgacgacatttttatttgttaaatctatcattaatggcatattcatgttgagcaacatcctttatatctttttacatcattacaccttaaaatatttaacaccaatcgctaataaacatcacgttgatagcgttgttgttgtttcatttgtcgcaataataactctgcttcttcttgagaaatatgacgttcttttaccaatacatctttaatggcttgatggacatctttcgccatacatttttcatcgccacaaatatagattgctgcgccttgctcaatccattcattgaaacgtttactttcttccattatacgatgctgtacatattctttgtgttcttggtctcttgaaaatgctaaatctacgcgtgttaagtttccattttcaagccattcttctatttcttcttcatataaaaagtcagaactacggtgttgatcaccaaagaacaaccatgtttttccagtcataccaagttcttcacgttcttgtaaatatgctctaaaaggagcaattccagtacctggtccaatcataataaccggtatatcttgcttcatcggaaatttgaagttcggatttttcttcaaataaattggtactatatcgcctggtttaattcgctcagcaaaatgaaccgagcatacaccttttctctcacgtccatgtgcttgataacgaaccgtaccaacggtaatatgcacttcatctggcgttgccataaaactactagaaatcgaatactctcttggtggtaattttctaaggatttgatacatattctcaggttgtaattctatagttggaaaatctgttattaaatctataaagtcccgatttataacatattcacgcgcccatgactcatcttgaatacgttcagataattcttcattgtcaaaatagatatctgcatttttcaataatggcaatgttaatttagtaaattcaaaatgtgatgttagtgcttcaacaataggaactgtatcaccatgatcattaattggcaccggagattgcggatcccaacctaacatgaatattagtttttcaaccaattcagggtcgttttgcggtaatgctactatacaatctcctggttcatatgattcactaaaatcatcaagtaaaaattctatatgtcgtgtttctttatttgaatcggtaccatttaaattgatattcgctaatacttctgcttggtatggatttgatttagaatatttcttttctttggcagacttaattgattcacttatcaccgattcactttgaataccttctgatgtggtatcaataatattaatgatgtctgccatccacttttctgcgtcttcttcataatcaatatcacaatctacacgcttacatatacgctcagcgcctagattttctagtaaaacatctacatctttaccggcttgacagaaaaattcatatgtttgatcacctaaagctagtactgaatatctcacatgatttaaattaggtgcgttatcgtcttctaaaaattcaaagaaatcccatgcattatcaggcggttctccttcaccatgagtagacgtaataataaataaatcttctaactgcgcgatgtttgtcgtatcatattcatccattgacatcaaaacaacttgatgtccgatatcacttaaacgttctgaaaaaatttcagctaaacgcatggcattacctgattcagaaccatatagcactgtaacatgccgctgattagcttcgatatgtggctctttattttgtaacatatacgttgttgaagttgcttgttcttctgatatttgtgattgttgccacacttctgtctctaattgttgttgattactatcacttgtcgtatcgttactattagctagtaaaaaaccactaagccactgttgttggctctctgttaatgtttgcagcagattgttaatctctgtgacttgtttttctgtaaatggactattagatgtatttaatttcaaatgttttcacctcaataaacttgaaatagatgattgactctttttttatcgatagtttagtcaattttttaatatgtatggtataaattaaaacaaacttgagttgtgtctgatagttatacttgcaaatatttacaaccttcatgttgcttgaatgacattatcagtaattcagacaaaactttgattatgtcgtgtcagttattaatgcatacagtaatgcatcgttgttattttttatttatttactatttattatgtaccaaatcagcctttcagtaaaataggtcaaattactgattttctaaatataaaatgcctcctaataacatactattagtacatcattaagaggctcttgtgttatttgcatactaagcgctcaaatttaaatttaagatgaagattcttgcaataatatttctatatttgtcgatatatccaatggatcttccattggcaagaatcgatttacaacatttccttgtcgatcgattataaattttgtgaaattccattttattggggacccaaagattcctggttgttcattctttaaatgcgtaaataacggatgttcatcgttcccgttcacagatattttagctaacactggaaatgttacaccaaatttctcacgactaattttcaagatttcttcattagaacctggttgtcgattgtcaaaattattattcggaaaactcaacactacaaacccacgatccttatatttttgaaataaagtctctagttttttcaattgttcgctatatatacattctgttgcagtattaacaactaaaatcactttacctctaaatgcttctaatttataagttaagcctttataatcacttacttcgatatcatacacatttctattattcataagacacccctacacagccttttttatattgaatatgttctttttagaatgttctgataaaataagtgcgcgtttacaccgtgaacacacattatatagcgtgatacatttttcgagcacacgataaataatgttcgagtttatgttgttgctcaacctatccgatttaccgtcttttttcacctgtcttactttattaaaataatcacattgtatagctgtattagtccagctacaatatcttccgttataacccctcattataatcatccttattttctatttttaaaaagacaattagaccgctctttaaactatagattaatacttaagttaaactcatacatactgataccatacgttagatctaacaatttaaaattcgttataactatggattaaagagctgcccaactcatataatccttaaaaacttcacatgtgattgtttattaagccctcctttatcttattaaatatccttataacccttttaaaattaaactgacacactcatacattgttacacgcgacgataaacgtcatattattgcatatcattaaaacaagtcactttgtatcgtgtgcgaccgaatacatattaaatcatcaataatgattattcaattattaaaaataaaaacgaacattctatatagagtttctacttattattttttcagcattgtctacattacttaacattcgtgtttgtaagtaatattgaccgccaatatttagacactttataagtatgccattcatcatttttaatcatattatttttcttattgatatttctattcatatatttctgattgtatatttagatataataatttgttattggaaaatatatgaaacaaatttgactcatctttttcaatatctaaatgacacgatgcatgattttttaattttgtaattaacttccttttaaattagactgaattgtgacaattttcaaacattttaatgtgtaaatcattggcaaaatatacgaattgcatttaaatcgtcaatttacatatatttttgcgtagtaatcaatcgttatcattgttatttatcgttacattatttcgagtatcagtatgtatttcgggcttcgtttgataacgacatttctttgtgacatcgcttcatcagtgtaacaacaaatacaatgatttcgtgatgttagttacccattttatgtgttgcataaaatatgttgttataaaacattttaaatcattttatataaacaatctatatatttttggcatttccaaaatatcacttgttatattaaaaaccgacaagacattttatcttatcggttgaaatttgttattgttatttgtaatgtttttaggtttctttttaatataatatatttcagtgaaaatacatgattgattgtgatttcactgaaacatggttaattgcgttgttgatgaataactttagcataaatataggaagttattttgtacatcgccatatatagaaacgaaattataatgacagctagtacgtaacttgttaaaaatatatgatggttattaatacctatcatatttagtaacgtatatacaatgttactagaaattaatgtgtgaatcagtgctactgttattggtattgcgaacaagaaagtcatttgatttcgtgttatctttgctattcttccattatctaaaccaagttttttcataatgtcataattgtgctgatttgcataggcttctgagacttgtttataatacatcattagaaatattccaatgacaagtacaattgatactacgccacctacaaatattagtccacctgtcaaacgatcccaaaccattagcatttctgatttagaatttattgacgcatcgtattttttcgatagcttttgtatttgtgatgttgttaatttcgtctttccaaatacattaaagtttatcgatattgtcgaattcttttgttcatgtgcataaaatccttttactttttgtaattgattgttatctttaacaattaaaaccatactatcttgaatcatcatcaaatttaacgcatgtgcgtcaagttgtttcactttaaagacttcattattaagaccgaccttagactgctttttaaaaataggtacattcgtaatcatacctatactttgattgtctaagtgtaatttgttttggtgatatcgattataatcttgtgcagtaaaagctgtaatcattactgattgtcttgaaaatatcgcgccttcattaccaatgaagtctattggaatatcatcactagcctgttttaacttgtaataagcacgattcttttctaaagaagctctaaataatgtcgtttcatatactttgaagtcttttgcattaaccgaaccctgtatatcacgtttaatattctcaattgtttgttgacgttctatttgtgacttagaattgtcgctaaatgacaaatcataatcattcgtaatcaatttcgtaatggtatgattcatatcacgataggttgttaatgtcattgtgagcgttacaatcaaaaatgtacacagcaaagtgattgttgcaagactgactgcattcattttaagacgtacacgcatcccaactaccacaaaaaaataccgtggatgatagtaaacttttgatacctgctgcaatatactaataattatttcacttatacctacaaaaaatgcataagtaccgataataactaatcctatgacaatccatattttaaaaaaggcaccaaacgtcgtatcttgttgtaatgcaataaagtaacctaaatatagtgctgcgcttcctataacaattaaaacgtaacgcaaccatcgtgatatgacactagaatcggaacgatgttgataagttatcggccgttgaaaattaatactaaacaagttgaatataagtagcatgcccattaatacagcaatgataatcaaagtaataaacatcgctacagagtcaaatggataataccttaacgtcgcaacttcactgcccattattttctgtataaacaagaaaaatatcgcaccaagtaagtatccgccggcaatactaacgactgaaattatcacaaattgtaagatagtttccatcactacaattaaacgcatacttttcttggtcatgcccaatgtcataaaaatgctaaactcttttcgtctttgtgacatcataaagtgatttgcatagaaaataaaaataaaagttaaaagcgccataaaaaaattagctatgataataaatggtactaggaagtcattcttctgttttatgtagctatttaacccaattgacacaagcgtatattcaatcatgaatagtacacttaccgctaaaatgaatggaatgattacaagtcgctgcgtaataaattgacgtcgcactatgtgccataacaatcttaacttcatatattgacacttcctccattcacaagtgctaagctatctgttattcgttgttgaaaagctaattgactttcttcaccacgatatatttcatgatatagacgcccatctttaataaaaatgactcgctctgcataagacgcatcgatatttgaatgagttaccattaaaattgtctgttccaattgatgaatctcttgaaataacatcatcaatgcctttgatgtttttgaatcaagtgcacctgtaggttcatcggctagtaaaatcgtcggcttagtaactaatgcacgtgcaatggcaatgcgttgcttctgacccccagagatttcagaaggatacttgtttaagaatccctctaaatgtaattgtactgccaactgatgtaccctttgttctatatcttttcgtttagcaccagctaaaattaatggcatcattatattttctttattcgtcattgttggtaaaagattaaaatcttgaaaaacaaaacctaccatttgttgacgatacaatgctttacttttatttttcatattatttaaatgtgcgccatccacaataatgtcaccttcagttagtccatcaaaagaagcaattaaatttagtagtgtagacttccctgacccagactcacccataattgcaacaaattcaccagctccaactgataaattcatttgattaagtgctgtcgtagcattcaaacctttaccataaaccttttttacatgtttcacttctagcaacatggcatgcacctcatttctttgttagttctatattaaaacaaaaaaatactaataacatttaaattagtaaaaaaatgttactagtatacttacaatattgaaagtttttattcatctggaaattgaatcgtaaatgttgtaccctcattttgtttagatacgactgaaacaggatggtttgtgtgtgttgaaatttgttttacgataaataaaccaatcccacttgagttactttggcgctggccattataacctgaatagcccttatcaaatattttaggcaagtccgcttcactaataccgataccattatcttttacgtgtaattgattggattgctcatcaaattcaatccatatatctttacctctcgcatacttaagtgcattatttattaattgttctatcattaaagaggtccatctaacgtcagttaatacttcgtgatgacaaggttcataatggatttttgttttttgatcaataaactgtattgaatatttcataataattgggcgaatgatattattaatcgaaattttagtgacagaaatatcagaagtttcatttaataactttaaataactaagtgctaaacttgtatagttatcaatttgaataacctcttgacgaacacgattaacaacattaggctcatctctttcaagtaacagttgtgctgcagtaatgggtgttttcatttgatgtacccatgttaaaaagtagctctctacatcatttttatattcaatttgttcatttttaagctgatacaacgcattttctaagttttcaatttgttgttgttggcttatagtttttacaaaacttaaatatttaatacctatgaatatgagtaataataataaaataacgccaagtgctagtaaatatgcttctaatggcaaatgatacaggtaaaacattaagccaaacaaagcaaaaataactatgactattgctatttcctgagtaatacttttaagaaaggtcattgcattcaccctatactttatatccgacatttttctttgtaatgataaaatcattaacgccaatagtatttaattttttacgcaggcgcgtcatgttaacagctaatgtgttatcatctatgaagttttctgattcccaacatttttcaattaaagcagttctacttacatatttatcttcattttgaaataataactttaatatttgtaattcagtcaaagatagctgtatgttttgttcttgatacacgacttttgcttcatctaatattaatgtacaacctttaaccgtcaatgaatcattagctactgacaagtcataagttcgtctcaataatgcttgaattttggcaatcgttaatgacaagttaaatggcttttcgataaaatcatctccccccatttgtattgccataatttggtccatattatcaatacgggaactaataaatataattggcacattagatgtttttcggatttcttgacaccaatgaaaaccatttaacgttggcaaattaatatctagcaatacaagctgaggttgattttggttaaagatagacagtatatcatcaaattgttcaacgacaataacaccgtaattccattttttaagttcagatgctaaactctctgctataacaaaatcatcttcaacaattaatattttcatctataatcttcttccttcaattgaattatcctttgttatctttttgttctttatcctgctgcaatgacggctcttgatttgaactttccgtgtcatttgtattttgatttagtgtatttgctttttctttctcgagttgctttttcttcgtacgtttacgctcttctaaaatagacaacactataaagaatatgattaataatggagataacattactagtatcatttttccacctcaaattatatttaattctatattttcacacgcttctattctaacgctttctataacaaattgtcatatatattcattttttgttattctaaatcactctgtttacatatttttaactaaaactacataattgctcaaaattcctcttttacactgaagacatagtcatatactcaggaggatgtcttatgttatcagttaaaaaagccacaaaatttgcagttgctaaccttattatcgtgtcaacggtttttagttctgtcacacctgcaattgcgcaatccgataaaagttctaaagatgaaagtttcgcggttggtaatactaaaaatccaaaaaatgttatctttttagttggcgatggcatgggtccatcatttaacacagcttatcgttattataaaaatgatccgcatgctaaagaaatgacccctactgcttttgattcatatttaaaaggcacaaatcgtacatattcaaatgacccaaaacagaatattactgattctgcagctggcggaacagcctttagttctggtcataagacatataatggtgccatcggtgttgacagtaacaagcagaaagtaaagacggtgcttgaacgtgcaaaagaaaaaggtaagtcgactggtcttgtttcaacagctgaattaacagatgcaacaccagcagcatatgctgcacacgtgacttctagagatgataaaaacgaaatcgctaaacaattttataaagataaaatcaacggaaagcataaagttgatgttttattaggcggcggcgctaaatatttcggtaaaagtaatggcaatttagataaaaaattcaaaaaagatggttacgaccttgccacgaacagtaaggagttatcaaaatctgataaagataaagttcttggtttgtttgcagataaaaatatgccacttgcaatagatgcttctaaagacgaaccatcattagctgatatgcaacaaagtgcacttagtaagcttgagcgcaataaaaaaggattctttttaatggtcgaaggtgcttctatagataaatcagcgcattccaacgatattacaggcgttatgtctgaaatggaaggttttgaaaaagcattcgatgacgccattcaatatgctaagaaacataaagatacacttgtcgttgcaacagcagatcactctactggtggtctaacaattggtaaagataaaggatacgaatggaatcctcaaccgattaaatctatgaaacactctggatcatatatgacagaaaaaatggctaaaggtgaagaccctgaaaaagttattaatgaaggttatggatttgaattttcacaagatgatatgaaaaaggttaaaaaagagaataaaaagctaaaaagactacttaaaaaagaaaaagacgaaaaatccgcagaagtagaaacgcaaacaaaagccctacaacacgctattcagaagccagtaaatgataaatcttatacagggtggacttccgatggacatacaggcgaggatgttaatacctacgcttacggacctagatcagaatcatttagtggtaatatcgaaaatacagaaagcgcaaaaataatatttgatatattcaagtaaagcataaaaaaattcccgagcactataacaaggtgttcgggaattttttatggtttaatttagtactcaatgttaggtgcttggttaacacgttcttggtattttttaaatgcgaagtataaaccgccaactaatgttaaaataactgctaattttttcatcattcaaactcctttctaagatgtgttgaaactgagttcaattaaattatatgtttttattatacactttttgacatattttttaaatttaagaatgcgaagatttttaacatttctgatgctagctttctttttcatctttcaaatgcttaataaaatcaaagccaggtcgccctttagccaatgcttccatcacatcataccaatccgaaccgacttgttgatatatattttgcaataattcatcttgcgccttgttcaattcagcaatgagttgatcgcctttatccgtcgaatataattttttgacacgtcgatcagtctctaaaactttttcaataatgagaccttgctcttttaatttttgaagtgttgcatgtgatccttgtttagaaatttctaatatttctagtaatgatttaatagtaataccaggtaatttattgataaaaaacaaaaaacgatgatgctgacgactcataccatacttctctataatttcatcagcggtagtaataaaggttttatatgcaaaataaaacaacatatgctcataatcgtttttattggtcgacatgatgatgactcctttcaaagcgttaacctcattataataaaatttataatgtaagtcatacaaatgatgataaaactataagctaaatctaagtttcacgagaaacatttttgtgtatcagcaaattgcgccaatcatattaatacaaaaataatttaaacacttagaaatgttagtcgtgcgtaaatagtttgtatctctcactctgtgtatttaatgcagccacatattttccaagaaataattaatcattcaccatccatgttatagcacgcttaatcgcttgatcccaatatgcataatcatgatctcctggtccatcttcaaattgataaggaacatttatgcgtgataaataatcgataaaatctaagttgtcttgatataaaaagtcttgtttaccacacataatgagcaattttggaatttgtttatcttcagctacagctttgtctagcaagtaatacggatcatgttcagttcctttaacacttgaaagattgccaattatggcctcttttgaaaaatcattccactctagatccattaaattttgcgcttcaaacacagcagataatggtacagctttggcaaatttatccccttgtgttaatgcaaatttaattgtgccatatcctcccatagagtgacctgctataaaattgtcatcacgctttttggaaagtggaaatatttgatgaacataatcatacacttccaaaatataatcataatagctatgaccatatgccatgttagcatatgcgctatgatccacattgggcataatcacagctaatttgtgttcattcgcatacctttctatgcttgtatatctcatatatgtcgtttcatcacttgataatccatgtaacaacattaaagtttttaatggtttaacagttgtatcgctattaaagaagctttgatcttccggtaaaatgactgtcaaattttgatgcataccaattgttggtgaatgatagtttaatgaaatataagccatacgtcatgacccctttctaattctactttatcaacattttacgcttaatcaattcactttaaaatcattttcaacaaaaaaaccgaatacaaatgtattcggcctaaaaaagtatttacgctttttctttatgatcttgcttgcgttttctaaacaatagtaatgatcctaataatgccatcattgcaccaaataaagttgcatttgtgttttcgctcttatctcctgtttctggtaaagcatcagttttgtgttgttttgataccttattagaatggtttacttcacctttaggatttgatggtgctttctgttcattatttggtggtgtaactcttgaatcggagtcactatctgagtctgagtcgctatctgaatccgagtcgctatccgagtctgagtcgctatctgagtctgaatcgctgtctgagtctgagtcgctatccgagtctgagtcgctgtctgaatctgaatcactgtctgaatccgaatcgctatctgaatctgaatcgctatccgagtctgagtcgctgtctgaatctgaatcgctgtctgagtccgaatcgctatctgaatctgagtcgctgtctgagtctgaatcgctatctgaatctgagtcgctatctgagtctgagtcgctgtctgagtctgagtcgctgtctgagtctgaatcgctatctgaatctgagtcgctgtctgagtctgagtcgctgtctgaatctgagtcgctgtctgaatctgaatcgctgtctgagtctgaatcgctatctgagtctgaatcgctatctgagtctgaatcactgtctgagtccgagtcactgtctgaatctgactcactatctgattctgagtcgctatctgattctgagtcgctgtctgaatctgaatcactgtctgaatccgaatcgctatctgaatctgaatcgctatctgaatctgaatcgctatctgaatctgagtcgctatctgattctgaatcgctatctgattctgagtcgctgtctgaatctgaatcactgtctgaatccgaatcgctatctgattctgagtcgctatctgaacctgagtcgctgtctgagcctgagtcactgtctgaatccgaatccggatccgggtctgggcttggttccggttctgggtctggacttggttctgggtcaaccggcggccctggagttgggtctttcggatttactgctgaatcaccatcagcacttccaccaccataacgtacaacattctcattattccaaccgaaaatactgtagtctctatttgttacaggatcaacattttcttgaataacctgagtttttaagttcttacctgtattgtcgtaatgcccttctactaatactacatatgttttagtaatatcaccaaatttaatactagctacatttggatgctcataatagattctatttttaaattggtctgttacttctttaaggttagagtcatttggatctgcatagtagctatctgataatttagatatatcattcacttcaaaaattctcagttttgtatctgtagcacttactttaccgctactttcttcgattttatcttggtagcctttaatatacacccacgtattacctaaaactcgttgcttagggttaacaaatactgtttgcttgtatgtgttttgacctgaagctgtatctacaccaataatttgagaagaaatgttcgcgccatttggtttatcaattcctgcaattggcgaactatagttataagtaattttattattaaacatttcatccgcaatattaatattcgcatcatatgttcctgatttaggtgcctttgctcggtctgtaaataaaggtaatgaaaattgtccgttaatattttctttattatttacataatctgtaaagacaaatgtatacgtcttagtcaagatatcatatgttgctttagctacaacatcgccattcgtacttttaatgtctgcaattggcatcgtattatttgaattagaataatccacgtctccattaccagttaaactatctggtaacttcgctgtaaaataatcccctgatttcactttatctgtcactgtaaaatttgccgccataaatgtgttaccactttgattagggtcaaatgtagtcttttctaacttgaaattacttgccgtaactttatcatttacatttgtacctttagcatcagcagcatttactaccggttcagcaacagctaaactacgtacagctctcgttctaacacttggtttactagttccttgcgcattggaaatcgtttgtggtgatgattgtggtaaatctaatgtttgagaatttttaagctcactgtttgttgctatgctattagcatcattcgttgttttattatctacttgagaatttgcttcttgaggaacagtttgatcttgcatttttgcagcagttgcttgatttttaattgccgtcggttgaggtgtttcatttgttgaagctggctctgttgtagtggtattgctcgtttgtgtagacattggttttgttgtgctatctacattcgcactgtttgtgtttgcactaatatcagatgtatcattagccgttgtatttaattgaggtgtttctatcatattgtttttttcggaatctgcacttgcattatttttcgaagattgcgttgtatcgttcgattgttctgaagcttgtgcttgatgattgcctatcccaaatagtatagttgcccctactattactgatgtggtacctactgtaaaacgtctaatcgaatacttattctgcttattcgacaaataatcaattctttttttcaaaaatattactccatttcaatttctagattagtctaaattgtataatgaaataagaattatatcaattgcttttcgaaaaaaattacgtaaaatttgttttcttcctatttatataacttaaaattttctgttaactagcaaaaatcaatatactatttttacactattacaaattttttacttttcaaaaacttagaagttctaaatttttcatcaccttaaattttactgtaatttcaacaatcaaatttaactaacattttaaattattcatcatgctagcaaaaaaggcctaacgtataaatgtacgttagacctcatgttcaacttattcattttacattgtatattaaacacatacatcattgaataaatgtttgcttactaaccaatttttatgatctttaacaacaagtttttcatctttaagttcatgaataatatgaccagctgtttcccgggaaatcccagccatatcactcatgagttgaatagttaaaaactgtttgatttcataaaattcatcttgatcgtatcctactgtctgacatagatggcatatcaatttgataattcgatctttagcaaatttacttgttaatgccatgttatagttcatgtgttgctgctcattatcatttattaatgcaaaaagtgtcaaaaatatatcatcattagctttgcacaaaaaggccatcaattctctaggcaatccaagaactgtacaatcggttaatgctgtacacaattcgttaacctctttcggatgaaataagttactgattggaaataatacttgctctttattaaaataacgatatacatctccattttgattgtaatgttctctaataatgttaccttcaattaaaaagtaaatattgctactttcttgtggcgaaaaataaataacttggcctttcgtataatgtctgacaaaacattcactttgatatggttgtaatatactatatggtatattaatgtaatctgctaatgcctttagttcatgttctaatttattatttctacccaaaataaagttttctgtcataagttaaactccttcaaaccttgcaaagtgtcagcagacaactttttcatttgaatcaacggagaaacatatttaatgttttgtcgcgtgataaagtgctacatgtgaatgtgtgtacctttattaccaatcaaagcttcgtatgcctgctctaaattggtaatgataacttttttgttttccccactttcaacaaatcgtatcgcagcttctatttttggcaacatcgatccttccacaaacttaccttgtgccgcgtattttttcagtgttgctacatcaatatcatcgatttgttgttgattaggttcattaaagttaataaatacattttctacattcgtaagaatcattaaggtatctgcttcaatcagcgttgctaatttctcactagcaaaatctttatctataaccgcttcaacaccttcataggtattttctttttttataactggaataccgccaccaccgcatgcaatgacaatatttttaccgtctgctaaagttcgaattaactggtgttctagtatagattgaggtagtggtgacgcaactacttttctataaccacgtcctgcatcttctttaaagactgagtctggctgttctttttgtaattcttcaacttcttctttcgtataaaaaggaccaattggtttagttgggttatcaaatcgtggatcatctttatctacttccacacgtgtaacgattgtgcctacagttctatcactattcatttcagttaaaatgcgattgatttcagtttccaaccaatagcctatcataccctgtgacattgcaccacaagtatccaatggcattgccggcgttgtgtcactgttcgatttagcttgttggattaataaacttccaatttgtggaccattaccatgtgaaatgacaatacgcgctggtgaatcaaataaaggtttaaggttttgcatcgcacatctaatagctgtttgttgtgcttcagctgttgcttctgttgtctgtatcgcattaccgcctaatgcaatgacaattttctctttcatatttttgtcgctccttttaaaaaacatttatcgttcccatcaataacttaattaacccgataactgcaagtacgataataatcataaaaagaatatagtctgatttaatcaaacgtgtctgattattcttttgaacgattgtataaacaagaagagctggaatataaagtaacatcgtcaataataagtaattgatacctgctgcatatataagccatatagcataaattgaggctatgataccaatcgtccattgtttagtagttgcttgctgtcgatgctctaaagtgtatttaacttggtaaaatgcactgaacatgtaagggtataaaatagcacttgatgctagtgaaaatgcaaattgatacgcactctgtgtaaatagcatacttattaaaaataattgtactaatatattggtaataagcagtgcatttacaggtgctccatttttattttctttagcaaaccattttggaaataatccatcttttgcaacaatgaaaggtaattcaccagcaagcagtgtccatcctaaccatgcacctagtaccgaaataattaaaccaatatttacaagtgtagatccccaaccacctacaatagttgcaagcacctgtgccatacttggcgaatctaattgcgaaatatgattttgcaaaatcacgccttgagctaatacagttaataagaaatagataattaaaactgatataagtcctataaccgtggcactacctacatcttttttatttttagctctactagaaaaaattactgcaccttcgataccgataaacacccaaactgtcactagcatcgtacttttaacttggctcattgtgctcgcccaactaaatggcaatacaccctctgacgtcatactgaaaaagcctgttttaaaagtgtcaaaattgaatgcaattatcatgcatatgattacaagtaaaatcggtattaactttgcaacagtaacaatactattgataaatgctgctgtttcaacgccttttaaaatcaagaaatggacaccccagagtagtaacgaggcgacaataacacttggtaatgtgttgcctcctttaaaaatcgggaaaaagttacctactgctgacatcaatagtgttgcataggcaacattgcctaaaaacgctgagaaccaatatccccaagcactgataaatcctacaaaatcgccaaatcctgcttgagcataactataaataccaccgtctagctccggccgttcattggttaaattttgaaatacgaacgctaatgaaatcattcctatagctgtaataatccaaccaataataatggctaatccaccggctttaccgcccatatcagacattatattgaacgcaccgccaccaatcatggatcctataactagtccaattaaagaagatttactgagtttgttatctcctgattcgttcatattcatttctcctttaataccaatatgaggtgtctgtacatgacacttatatcatcagacacatcatattcatatcgttccatttagtgattaactccccaatgttgctgccattactgccttaattgtatgcattctattttcagcttgatcaaacacttttgaatgttcacttctaaagatttggtctgtaacttccatttcagctaatccatatttttcataaatttcttgtccataaagtgtatttgtatcatggaatgctggtaaacaatgtaagaatatcgttgaatctttacctgttaaatcaaacatctgttgattcacttgatagtcttttaataaattaatacgttgttcaaattcactttcttcacccatcgatacccaaacatctgtatatatagcatctgtattttcaactgcttctgcaatattatccgtaatcatgactgaaccaccatattgactcgctttttcttttgcaatatcaacatatgcctcttttggatttaatgatttaggtgtacaaattcttacattaacacctaacatagcacctgctaccattaatgaatgcgcaatattattacgtccatctccaacgtaagttaagtttattccttctagatatccaaaattctcttttattgtcataaaatcagctaacatttgtgtaggatgccaatcgtctgttaatccattccacaccggtacaccagagaacttcgctaaatcttcaacagcttgttgtgaaaaaccacggaattcaataccatcgaacattctacctaatactttcgcagtatcctctacagattcttttttgcctaattgaatatcattttttcctaaaaattctggatgcgcacctaaatcaatagacgcaactgtaaacgcagcacgcgttctcgtcgaattcttttcgaatagtagtgcaatattttttccagataagtagtgatgcttaataccgtttttcttatactcttttaatgtaattgcaaaatcaataagtccttcgaattctgctttggtaaaatcactttcttttaataatgatctgccttttaaatcatacggtttttgaatttctgtcattattttcaccctcgtttctataatttattacgttaaatgtcttctctgaataatggttgactcatacatctagggcccccacgtccacgtaccaactcgctaccagatatttcaatgactttaatgcctttttgtctcaataaatcattcgatacatagtttctatcgtaagtcactacaacgcctggtcttatacataatgtatttgagccatcattccattgctctctagcaccatcaatgacatcaccatttcctgttggaatgaattggatatcatctatacctagtacgtcttctaaagtatcttttaaatgactagattgtttgatggcaatatctttatttacgtcatcatattcaataataaatatattcatattgccttctgcctttaaaatggctgaatgcattgtaaatttgtcataatctatcattgtaaatactgtatctaagtgcataaaagttcgactagttggaatttcaattgctactacttttttaaacgtcgcctgcggattttcaaaaatacgtcgcgctaacttttcaatagcttgtgcagatgtacgttctgaaacgcctatagccaagacatctttagataaaacaagttcatcgccgccttcaatattgaatgggcaatctcgatctaaccagattggaatattcgcatctttaaatctaggatgatgctttacaatatattgaataaatattgattctcgtcgtcgtgctctccagaacatccgattgattgttataccgtgtcctattgaggcttgtggatctctagtaaaataaaggtttggcattggatctaaatagaatggatacttatcatccatatactctactagatgtgtacatttcggattaatttcttccttacgtacccctgacattattttatctacaagttcttgattagaaagtgtcgcaaataatgccttaatttcttcttcatgacctaatattgtttttttagactctgctaatacatcatcaataaattcacttcttacttgaggattttcaatactttcagctgctaacttctcaaggtaaagtacttcaacaccctcttctcttagcacctgcgcaaaatggtcatgctctttttgagctacttctaaatatggaatatcatcaaatagtaatccatctaaataatcaggtactaaattttctaattcttttccaggacgcttaagtaacacagtttttaaagctccaatttcgctatttactttaattggaccatctgtcatgtctatttcctccttttatctttgaattcatttagagtatagacaatcttcaaacgcttacatgtgattatattcacataaagaaagtcgaaaatttcatatctttttgttatacaatacataataatggatttttatacataaataaaggcattttgggtcaaaatatacattttttattcaaaaacacccataaaaacatgttgtataaagttttttatacagtcaattgaatgactatgaattctttctttccataaaaaaacgcgtacacaagttaatatttggtaactaacttgagtacacgtgatacgaaacaaatttttattattcatttgatacatgtctatttaaataattttgcatatacgtattctgccatatcatttgaggcagttaagattaatgtagtgtcatttccactcaccgtacctaatatctcttctatatttagctgatcgataaaatagtttatgccttgggcgaaaccaggtgaggttttgacgataatgtatgaaccattgatgattgaacttagaacttcatgttcacaatagtgtctaaacttttctctcatctcttgttctgtttgattattaatagctttataaatccatgtctcacaatcgatagggacacgatatatatttagttccttcaagtctttagcaattgttgttgcactatatcttacaccaaaatattcttcaatatatgaaatgatttgttcttttttataaatcttatgctttttaactattgtagaaacaatttctaatcgtttacttttcttcatattgtaaactcctttggtagttacgtttcttgtattaaaaaataaattcatgcatgtttcatttataatttaacactttgttttgcaaaatataataaaaatacatgtaaattttttgtgacaacttttaaaatgaattttgtattctaagtcagcatttaattatcacatatctactacttgtaatgattttagactgccgagtagtctttcggcagacaaccctcacactcctctcatctaattacaaagagagggtatacctacaaagtcaattatcaatgtaggtataccccatatataagctgtatttaaaatttaattatttataagtgtttaacattacttcttcttgtttatatatttttactccacgcctacttcattccatgcttcatacacctgttcagctgtttgctcgtcatataaatctttagccgcttggtataatgcatctttacaatctttgaagtttgaattacttgttaagtattccgttaatgctcggtagtaaatttgttctgatttagatttccctattgcttgaatcacgttataagctgctttatttggaattccagaattcgtatgtacgccaccattatctttttcagtgaatacatagtctttcatatgagctggttgaccaaattgttctgggtttgacatgctgcgtaaagcgtctccctcttttccaggtgtgtagacatcttcacccattaagaaatcctcgtcatctacaaagtatccaaaaacatctgaaaagctttcatttagagcgcctgactggtccttatattctaagttcgctgtctcttgtgtcacaccgtgtgttaattcgtgtgctactacgtcatttgcacccgataaacttgtgaatgtgcgaccatcaccatcaccatagatcattttgtcaccgatccatgcggcattatttctgttatcttgaccaccgtagttattaacatgcgttaatgaaacaattggactaccttggttgtcatatgattcacgaccaaatgtgtctttgtaataatcatatgtttgtttagcgtaataatttgcatctacgccagcacgttgctcatcttttacgaagttttcatcttcattagtaatcaatgttgcttgacctgtttgatcattaaagctaaatgctgataatttaccttgatgcgttaaatcttctaggctaaatccaccgtcaatactattgatattgatatcttttgtatcgccaagtacaccttttcctttaccagtttctgcagcttctttaactaagttcattttttctaaaatttcgccagtttgagcatcaattttaactttccaatgtgaaatttctggtgtcactgtaattaactcaacattataaacgtatttattactgtcaccatcgatttcaactttgttttctttaatgactttatctttaagatttttcgctttattcttatcaatcttaactgctttaaatgctttgtcggctgcgtcatctttacttaatgtcactttattcgttggctttactttcttcgcatcagtatccccattgattaaaacgacttttcctgatttgtctgcgtgtactttcacttctttgtcaggtgcatgaacaccatcaacactcggttgcaatgtataatgcgtaaatccttttttatcagtttttacatcagtaacagcgtaatcttgataaatattttttacattttcggatttaggcaattcttttaatgctttgaccgcatcactcttttgagtcacctcaaatttaatatcagaattagctggtttattttttgaatcaatcgctaatgctgctggtgataaagtgctcaacaaggttaatgctgccatacttgtaaatgcatatcttgaaaatttcctcacatttcattcctcctgaaatcttaaaaacagcttataaataaaatattaatttaatttttcagaaaagtaaatgattatttctatttatttctatactttttgttcgttgattttatttattgattcttttcttttttaaaaatgttatctgtagctaaataaaattttaaaaattgagcttaattatattttaaaatttatcaaggctttatttttgtgaaaatattaacaaatacaaaatagtgctctatatacttaatcaatgcttgaaatatgtgagataactatttaaataatcataatcaaataaacatttttatcaatttcaaacaactatgtaagacgcaataatcgttattatttaataaaaaagactagaatgcggtatcactcctcacactctagccttaatatgccattattttatttacttgttttgtatggtgtatgtccaactgttacttcgacaactctattatgatcaacgacaaaccagatgcctaatgtctttttagcattttgatagtaaaaaataccgctatcagcttcctttgttttaccattttcttttttcaagtccttgccataagctttttggatatcttttaatgaaatattatttttaactacaaattgcaattgacttgcttcgtttccttttgcagaaacacctttaaaagtttgatcatatttctctactttttttatcgtattcgttttagctaatttaataccattgaatttcacattatcatacttaatcgcgttaataaaattcttatccagaataaaattagcattattaccaatataaccattataagtataatatggggttattgctgcctgtgcctgtttacttgttggcgccgaattttcaacaactgttactccaatcagtgtgcccaatgctaatgttgctgctacacaaactttactggttttattcataattatctctcttttccatacaaatattttattccttacacttttattataactttttcagccataaaaatactaatgattatatttataaatacataacagttttgttatactaattgaagtacacaaaaaacaatgaaaatattaatatcgcctacttttctaatatttattttttaaaatgattatggcaatattgaaataaattatttagcttcacgtatcaactacttttcattaacatggaggcgttatatttgaaaaaacttcttattaccatcgtaattatcgtattaatcggagcacttgggttcgcaatttatgctgcaataaatcattctacatcatcaagtaataaccaagaacaagaaaataaatctacgcataaaaagacagaaaccgaagaaaatgatcaacaagatgatagtgcagacaaaacagataaaaatcaaaataatggcaataacgttactaatgacaatcaaccatcttcaccgtcaaatgttcctaacaaccattcaacagtaccatcgaatacgcaaccagctcagccaaaagactcaaattcaaataaaaataatactcacggtggtggcagtcaatcgtcaacaaacaaccaaaataatcaacaacagaacacaccacctgctaataaatcaaataataccaatacgccttctaaacaaacacctcaagcacaatcacctaaaaattaatcatttgcctgatacgtccacaagtaccagatgcataaattcagaaaaacagcagtgagatatttttctatttgaaatatcttactgctgttctttatttgcataattcgcactctgttaaaatcatataaaagttcgctttaatgtcattgacgtatgtataagctctcatgtttaataatattaatacacccttaaaaacgcttacacgaaaaatttagaaaggaggtacatgttaaatgcttgatagacacttaaaactactccagttttttattaaaaatccatcaaagcacattagttctaatgaaattgctaaacatgtcaatgtttcaaaccgcacagttcgcaatgatatccatgttatcaatagcaattttatggatgatatcatcgtaagtattaaatctaaaggatatcaattaaatacatctcagtataccttagaaacgataactgaacgttacacgcatattcaatcatataaagaaaaactattattatctatggcgtatcaactgctaatgcacaataaatcgcagacattgcaacaactagagcaagattatctattatctaaaactgtgctcaacgactatttcgttcgaattcaacaatggtgtcaaaaatttaatatcgctttaacaatcaagaaaaaacaaggtattgtggtcgatggaacagataatgatatcactaatgccatcatccatttaaatcaattatcatcagggcatgtacatgttgaagacctaattttaaatgaattacctgattcacaccaaaggatgatttcgcatattatacaagagacacttcaacaacatagtattgaaacaactgatattcaaatacaacagcttttaattcatctcattttaatcattaaacgtaagcaatctttaagtgagctagacacgttaaaccacgattcaaaattgatatctcaatcttgcattaagcaaatcaacgaaagattaggttatgacttgaacgaaaaagtaatcaatatgttttcattctttattgcttatcattttaataaactcgatattggcatagaacgtatatttatacaaagttatattgatcgcttaatcgaattgatgcagcaacgtattcatgtacctttcaatgaagattcgattttacaacaaaatttatataatcattttagtaaagcatatttacgtatcactcaaaacatttatttaaacaatcctttagttatagagattaaaaaactctatccctttgtgtttaacacactttttgaagcgattgataaattagcaattgatactgatatagagatgagcgaagatgaaattgcatttttaacaattcattttcaagctgccatcgagcgtcgtaccaaaacacaattaaatgtagtcattgcttgttattatggtctaggtgtgtcgaattttttagaaactaaaataaataacttatccgaagagttgtcagtgataaatacgattaaactagaaaatataacacactatcactttgacaatgtagatttattaataacgacccatgatattcctaaacaaacgctaaacatacttcctaagcacctgacgactatcaaggttgcaccattattttctgaagatgatcgtcacaaaatcagacacgttgtgaagcaaaagcaaaatccggttcaagcacatcatcatatggacactgtcaatttccttgtcgtaaatactgaacaaaaatcacggcatactgtgcaaatttttgaagaagctcaaaaaatattacaagcacatcatgcgattgtagaaggatatatcgaatcagctttagagcgtgagaaatcatcttctacatacataggtaattttatggcgattcctcatggagatcctgaaaaagttttacaatcacatgtgcttatttttcgcacaaaagatgtttttccttggcgacaacacgatgtcaaacttgtctttttcttagcgatttcgcataaagacaaagcttttacaaaacaaatgatgcaattaattgctaacttggatgatgattcagtgaaccatttatgtagtttagatgatcatagtttaaagcaacagttatttgaatacttacaagaataattgccactagtaacggtaattattcttttttttagtatcgagaatacgcttacaatatagaaaaggagatgattttatgaaaattgtagctattacctcatgcccaaatggcattgcacatacatatatggctcaagaaaagcttgagcaggtagcaaaagaaatgggtgtggatattaaagtagagacacagggcggtgttggtgctgaaaatgttttaactacgcaagacatcgaagaagctgacggtgtcataattgcagctgataaacaagttgatctgtcccgatttgttggtaaacggttgattaatgaaaatgttcgcgaagggattcataatccgagaggtctaattcaacgtatcattaatcaagatgcgcctatttatcaatctgaaacaaattatcattcgaaagatcgcggtaagtctaaaagtggtattcaaatggtgtatcaacatttaatgaacggtgtatcgtttatggttccttttatcgtagttggtggactccttatcgccatcgcgctgactctaggcggtgaaacgacatcaaaaggattagtcatcccagatgattcattttggaaatccattgaaaacattggtagtttagcctttaaatttatggttccaatactagctggatatatcgctgttagtatcgctgacaagcccggtcttgttcctggtatgattggcggcgctatcgctgctgacggtagtttttatggcagtgatgcaggcgcaggatttttaggtggtattgttgctggtttcttagcaggttatatcgcaaagtggattaaagatattaaagttccaaaagcaatggcaccaattatgcctatcattattattcccattatttcatcggtcgttgtaggattgatatttatatttttaatcggtgcaccaatttctaatatttttgaggcattaacaacctggttaaaaagtatgcaaggtgctaatattattatacttgcgatgattataggtgcgatgattgccttcgatatgggcggtccagtaaacaaggtagcatttttatttggctcagcacttattgctgaaggtaattacgccgttatgggtatggtcgcagttgctgtatgtacaccaccaatcggtttaggtttagcaacgtttgttcaaaagtataaattcaatcattccgaaagagaaatgggtaaggcttccttcactatgggactatttggtattactgaaggtgctattcctttcgcagcccaagatccattgcgcattatacctgcaaacatcattggtgcaatgattgcatcagtcattgcagccattggtggtgtcggcgatagagtcgcacatggaggtccaatcgtggctgtattaggtggtattgatcatgtattatggtttatctttgcagtgatagtaggtagtcttgtcacaatgactactgtactattattaaaacgcaatacaccagttatagcagtagatgcaccagcgcaacacacgcaacttcatgatacagatattacacaacatgatacagaggttgacaatgtagataacaccgcgaaacattcacatctcaataaaccttctcatgtttttgatcaacaaactatgataattactgatcacgacatgtctcgaaacgaagcaattgatatgttgattcataaacttaaaatttgccgttatgtagagcacacatcgcatttaaaaaatgcaatactagaacgtgaaatggggtctacgacagctattggcatgaacgtggccattccacatgcaaagtctgatgttgtaaaacaaccgattgtagctgttatgaaaaataatcatggtgttaaatgggacagtctagatggtagtctacctcaattgatattcttaattgccgtaccaaacaacagtcaggatacacatttaaaaatacttcagcgcttatctaaagcgttaatgaatgatgagacacgccaatcactaattaatgcaaacagtactacagaaatttataacttattaatgaaaatatagaggagttttaactatggcattatttttacaacccgtttttaaagacagaatttggggcggtcatgcattaaaagcatttaactatgatatccctaatgaaacaactggtgaatgctgggcaatttctgcacatccaaatggtcctaatacaattatcaatggtccatacaaggatatgaccctagatcaactttggtcacaacatcgtgaattattcgataatgattcacgagatagtttccctctgctaactaaagtattagatgccaatgataaattatctgttcaagttcacccagatgatgactacgctttaaaacacgaaggcgaactaggtaaaacagaatgttggtatattttagatgcagccccaggtgctgaaattatatatggcgtacatgcacataataaacagacgttaatagacatgattgataatcatgaatttgacagtcttttcaaacgtatacctgttaagcccggtgacttttattatgttcctgctggcactgtccatgccattggttcgggtattttaattttagagacacaacaatcctccgatacgacataccgtatttatgactatgatagacgagatcaaaatggtcaattgcgtgatttgcacttagagcaaagtaaagatgtgattgaattaggcaatcatgaaccaaatactactcctataacaactcacatcgacacacacactgtaactcaatttgtagataatcaatattttgcagtatataaatgggatattcatggagatttaaaattcaataaaccacatgcttattgcttagttacaattatcgatggtactggtactttaacagtaaacgataagcactatgacatccaaaaaggttctagctttattttaactacggaagacgaggatattcactttgtcggtaatattagtgctatagtaagtcatcctggataatagcaatgataacaaccgtcccataaaagacagaaattactatctcttctgtctaaaaacataaaaatccacacattaaggagctataaccctaatgtgtggatttaatttttattctgtaacgttactttggtcaactttttcagatacgcgcttcatcaatggatctgttacaggttttaaaattaaacctacaacgaagaatcctataccaaataacgttaatataattaattttgtaattaggatttccggaacaataccgcctactgtttcacgtaatgaatcaattgcatacgtaaatggtaagtatggcgaaatgttttggaaaaattgtggcgtagtttgaattgggaatgttcccccaccacctgcaatttgtaatacaagcaatacgattgcaatggctttacctgggttaccaagtaatgatacgcacgtatatacgattgagttgaaaataatcgaacagaaaatcgttataagtacaaataatacaggtgactcaactcctgcttttaggattaacaaatctccaaccgatacaatgagtgcttgcaacataccaagcattataaagaatcctgccttacctaagaacacttgtcttgtcgttaagactgactctagactcttatgtttattatcaaccgttaataaacttaccatcaagagtgcacctacccatactgacagtgcagtatagaatggtgtcatacctgaaccataatccttaactgggaaaacatcaacagtcttcttattaataggatttgcaataatacccgcttgctttttcaaatcattcttaagtgtgtcgattaatttgtcgactgcatcatctttgtctaatttcttgaaaattttattcgcttttttcaaatctttttcaacatcaggcaatttattttgagaaaaatcagctaaatctgataaagcctttttcgcttgtggctgatttttatttagtaatcctaccgcttgatcataaccatttaataacgttggtaaatttttattcacacttgctgtcgcattagttaatcgctgttctaactgtggtaagtcattgcgcacaaagttagcagctttagctacatcacttttcactttcgagaagtttgcttgagcatttttaacagcactaatgtattgttgttcaatacttggtaatactgtttgtaagcgatcaatacgtgttttaccattttttaaaatagcttgtccactgttaatgacttgatcaattgtatttaatttagactgaacattggataatgcagtttgccctttgttcaattcatccataatacgttgtgatattgatactaaagagctgttaagatcttttttaacataatctctaaatgatgataatgatgaatctagttttgaaagttgatctagtaatttagtagcttcagcagttcctgaactaccattctttaatgcattgcttaattgattaactaaccttaatgattcattaattcgattattagctgcttttaccttatcaatttcttttgataaatcaacattttcattcttctcaatctcttttaatgtatcgataaattgttgattatattgcgttgtgtattctaaaccggacttaacattatctaaagactctctaaaatcagaaggcttgtccgatgctaaaatcccatacgaaatattacgtaatgcctgactatctttttgtgcggctttcgcttgggtatctaaattatttgataatgataataaagagcccgttaatgccgcttccattgatttaacatctttatctgtaatgttttgtgtgttctcgttagctgtgctgacttgtgttgttgttatatctacaaaactttgaccatcttttttcccgcttgtactttgtggtgtagtcgatacaggcgcattattactatttggtgcggtattttgcgtaacattattatttggtgcagtatcgccacttggtgcacttggtggcgttgatgctacaccattaccagctgcaggtgcactatttgatgtttcgttgttcgccgcgctattttgaggaatctgttgctggtttcttcgatttaaatcttgcgcgcgtcgaattgcatcttgataatcaccgactctacttctaacttgtgtgacgaagcctttggcatcatttaactgtccattagcttgatcaataccttgactcgcaatgttaagtccttgattaattttagggaactgcgctggcacgtcatcagctgcaaaatttaacgctttttcaattttcggcatataattatttaaagctaatatcaacttagccttttcattaagttgcggaatagcaccattgacttcgtttaattttttctgagcatctaaaatatcacctttataatttcctagttttctaaaatcattggcatatttatctaaatccgcttggtggttattcaaatatacaattttattcgcaaagtcattaatcttaggtaaagctttatctgctgaatataccgcattttttatcttgttaattgtcggcacattttcttcaatagttaaacctgctttgttagcttcttctaataatgctcgagttactgttttattaaattgttcattcgctttttcaacgacaactgacgaaccagtatctgttagcttagacgcaacagcgttaatcttctgattcaccttaaattctacatctgctttttgaggctgcttacgtagtgtccctgtaatttcatgtgtaaacttagatgggatgtaaatacctgcaaaatatttacccatttttatctcatgatcagctttctctctacttacaaactgccaatcaaaacttttatttttcttgagtgtattaaccatcgtattaccgacattaacttttttccctctgattgtgtcgcctttatcttcattaacgactgcgaccttgatgtgtcccgtgttgccatatggatcccacattgcccataagttaaaccaagcgtagaacgatggcaaaatagctaagcctgctaagataatccacacagctggcgtcttagctactttcttcagatccattttaaataatttaaatgcgttcttcattgtcacactcctatgtaggaattattcatattttttatatattttttgtaaattaatttatttttgcgttgtgaattagtataatcaatttactggaagatatttagtcgattgatacctatcaactattttcagcatacgataaattataacaaatcatagtttattatcacacttaattattatatttttcaagggagaatacgaaatatgcctaaaaataaaattttaatttatttgctatcaactacgctcgtattacctactttagtttcacctaccgcttatgctgatacacctcaaaaagatactacagctaagacaacatctcatgattcaaaaaaatctaatgacgatgaaacttctaaggatactacaagtaaagatattgataaagcagacaaaaataatacaagtaaccaagacaataacgacaaaaaatttaaaactatagacgacagcacttcagactctaacaatatcattgattttatttataagaatttaccacaaaccaatataaaccaattgctaaccaaaaataaatacgatgataattactcattaacaactttaatccaaaacttattcaatttaaattcggatatttctgattacgaacaacctcgtaatggcgaaaagtcaacaaatgattcgaataaaaacagtgacaatagcatcaaaaatgacactgatacgcaatcatctaaacaagataaagcagacaatcaaaaagcacctaaatcaaacaatacaaaaccaagtacatctaataagcaaccaaattcgccaaagccaacacaacctaatcaatcaaatagtcaaccagcaagtgacgataaagcaaatcaaaaatcttcatcgaaagataatcaatcaatgtcagattcggctttagactctattttggatcaatacagtgaagatgcaaagaaagcacaaaaagattatgcatctcaatctaaaaaagacaaaaatgaaaaatctaatacaaagaatccacagttaccaacacaagatgaattgaaacataaatctaaacctgctcaatcattcaataacgatgttaatcaaaaggatacacgtgcaacatcattattcgaaacagatcctagtatatctaacaatgatgatagcggacaatttaacgttgttgactcaaaagatacacgtcaatttgtcaaatcaattgctaaagatgcacatcgcattggtcaagataacgatatttatgcgtctgtcatgattgcccaagcaatcttagaatctgactcaggtcgtagtgctttagctaagtcaccaaaccataatttattcggtatcaaaggtgcttttgaagggaattctgttccttttaacacattagaagctgatggtaatcaattgtatagtattaatgctggattccgaaaatatccaagcacgaaagaatcactaaaagattactctgaccttattaaaaatggtattgatggcaatcgaacaatttataaaccaacatggaaatcggaagccgattcttataaagatgcaacatcacacttatctaaaacatatgctacagatccaaactatgctaagaaattaaacagtattattaaacactatcaattaactcagtttgacgatgaacgcatgccagatttagataaatatgaacgttctatcaaggattatgatgattcatcagatgaattcaaacctttccgtgaggtatctgatagtatgccatatccacatggccaatgtacttggtacgtatataaccgtatgaaacaatttggtacatctatctcaggtgatttaggtgatgcacataattggaataatcgagctcaataccgtgattatcaagtaagtcatacaccaaaacgtcatgctgctgttgtatttgaggctggacaatttggtgcagatcaacattacggtcatgtagcatttgttgaaaaagttaacagtgatggttctatcgttatttcagaatccaatgttaaaggattaggtatcatttctcatagaactatcaacgcagctgccgctgaagaattatcatatattacaggtaaataagtattatattaaacccgtaaaatttataagtataaacaaggagttcggacttaaacatatttctgttcataagtctgatttcttattcaattaaacccgaggcattcagttcgaacgcctcgggtcgttttatataaatatattattttatgttcaaatgttcctcatcatatccgtttcaattgccatctcacacattttataaatatgagcaaatgtacttattctcaaacattactgccgagctttaattgacgttatattaactataaactacttttccatgactctacggattcaatgtcacatgagcgtgataaaatttgttcaataataaagtcatgtttatcatctgatctatcaccaacagcatcttctaaaacagtaatataatagtctttatctacactttctaatgccgtgctcaatacagctccacttgtagagacacccgttaatactaaatgattaatatcatttgcacgtaaataaacttccaagtaactacctgtaaatgcgctaaagcgtcgcttagaaataatcggctcatcttctagtggtgctaaatcttcaagtattcgtgtagatgcatctgcttcagtaatcgcatatccttgagctttaattgttgaaaacactttattactcgaggagacatcattaaaatgcttatctaacactaaacgtatgaaaatgactggtattcgatgttgtcttgctgcttcaattgctctctgattcgctttaataatattttttattctaggtacactactcgctataccttcttgcatatccaaaactaatagcgccgtttttcgagacatcttcattctcctttacttgtgtagttctaagtcgttaaattcattataacgttaaaatgatggacaatctattcattgcattttgcatatacttcacaataaattaaggggaaataagacgtcttatatacttaaaaaaatatatagatgctcttcccccaatataattatgctttatttttcaacttattgcgtcgtgataaccaaatcattagtacacccattgcaccaacaattacagatatcggcaaccaatgttcttttatcgtttcccccgctttaggcaaagatacattaccatcagcatttaataatccacttaacaatccattacctttaccaagtgttaacgtcttttctggctttggtgtgggtatatctggaatactgtctaataaatctgatccttgattcattaaatttgctaacttatttaaatctgtcgttttcccatttttattcaatcgatctagtaaacttggacgatttactattggtgataaaatataatctatatcttttttcgtttgattgagtctcttttgtaaattcaataaatcatccgctttaccattcaatgccgatttaactaaattaaaaattttattttgatctgtttctattttagtaattaaatctgccagtaattttgccttttgtctttctatacgtgttgctaaaatcgtttcaattgcttgttttttatctttggcattattcaaaattgcttttaatatatcatctgaagacgtgtcgccagttgatgcaaaatgtttcttcaattggtcaacgatttggcgatttgataatcctttattcgtccaatctttagccaatttatctgcttcagcttttcctaatttcgtttgtaaaatttgagaaatcaatagcgacttatcttgtgattgatcaatcaatgacgttaataaatcatcactcgttgtcagagataattgatcaatatgacgagtaatttgatctgcaatttgttgatctgttttaccatcaacacgtatatcttttagaattttaactgcctcgtctttattaaatatactttctaaaatgctttgtgtagcatactttttatcatcagtacgtgcaagttcttccaaaataatatttcgttgactttttatacgctctttcgtcttatttacttcgctcattaagtctgatttttgatttttaggaagttgcgtatttgcaatacgttgatctaaagattgtaacgtattcagtttatgatatgtgtaatgttgcgttgaggcattacttttagctaatttttcaatcatagcatgattaattttatcgcttccttgtaatttatcagtgagtcgattactatggctttgattctcttcatttgaaaggaatttatttaacacaacatgtccagaaccatcattatttggcgttttagctacttcatgattattatctgttgtagacactgctggatcttccgatgtatctttcgatgcatctttcgatttgtgtatttgctgattcaaatggtctaggtcttctaacgccttatttaccattgcttcatcatttttatcatctttttctccatgttttgttgtagccgtttgtgacatatcatttttcattgcattaagatcgtcctcgccactttgttgacccctatcaacatttgaagaaacctcatttaaatctttaagcaattgatctaatttactgtctatatcactttgaccgttcatttcagtgtgagaacttttattgtctttgctatccaactcattagctcgttttatgatttcatctatttgcgatgctgttttcgcttcatttagttgtgctttataatgttctttagatgaagccgataactgttttaattgctcaatttgacgaattgccttgtcaactttgtctaataaatcttgcttagataatatctcttttgtaatttcagtatccttttcagatgcagcttgggcatcgtacggcaagatattcgttaaaatgatacttgtcgccatcattgtcgaacacgataactttacatataattgaaacggtttccctcgatatttagccatcaacatactccttcctcacttacttccttcaaagaattacatactattatatacctgtttacaagaaatttacacttatctatctagttattgttgttagtaattatctacttattacttagcttatatttaagtaaacaaaacaagcatgacgtaatatcatattgtccatgtcgctaacatcatattacgtcaaatcttttatattaaatgatgttttattttagactgctttttccttttagctttcgagcgcctgtttaaaaacttgctcgaattgttcacgcgagatttcgtgtgcatgtgctttttgtgctaataaagcatctcgaaactgttgttgatctttcaaactttctaacatttgtattaattggtctttactttccattgttatctcatcattatgctcaaataagtgctctgataatgttactttagcatggtgtgcggtttgacgataacctaaaatcaacaactcatagtcaaacgcttgttccaccgcatttaaaatttcattaccctcattgatatcaagataaatatcacataactggtatagttcatttaccctgtcaatattaatagatgggtataaatgcacattagcatattgatcaagttgcattagcttatcagacatctctgtaatagcagcgatgtgaaacttaaaatctggtaaagtttcaaccaataccttgatgttacgaagttgatccgagttagttaatattacaatttctttagtatatctattacgactacgatagttatatagatatccgccttgtaaaatacgagattgaacctttgcgtctgctatattgagcatcgtttcatattcgtttttatctggaataataatattacaatgtcgtttcatatcacctttacacatcaattgcatatttcccgggacattaccattacagtgttcttgccataccaaaacatcactaccttttgatggcaaattatataacactgaaaatggtagggctagtgagttaataacgaaatgatgttccgtaatttcaagttgcttgataaaaaataatgcgaatgcgagctttgaagggaaaaagtaagacttcccttgccaatccaatatgacatcagatgttacaaaattttcataaatcacttctttaccttctgctgtcatatatttcttcaagatcgctttacgatttaaatcgtaaacagtttgtgcaaatttaataccattcttagaataataatcgacaaatcggacacgttgttggtcatcaaaccattcgacacgactaacaattctagggcgctctccactttgataaaatattttacctcgtagacgtcccatatcattaattgtagccgaattgttgttacctttaatttcccaaaaagctggtacagtaacctgattaaaaaatcgtggtttcatattttctgtattatgattatctgcaaaaaattgatacggtgatataacatcgtccggtaaaaagccattgtcattgagtacaattgttaaatcttcttccaacttactggctttaaaagactcatataactttcgtgaatgatcgttaaagtaatcaaataatttaatcatgtagcacctcttgaactaatgtttcccattttaaaataatatcttgagtcataaattgctgtgccacttcataagagatgtcatgtggtgtctggggaccattgttaaaatacattacaatggcatgagctagttttgcgataacatcatccacactatcttcgtcggtatcaaaaggtaccaagtagccattttccccatctcgaataaaggttgggttaccataattcacatttaatccaatcatacctagtcctgagcctaccgcttccattagtgttaacccaaaaccttcgctagttgatgcagaaagaaataactcataatcattataaatttcatcaagtttaacatgccctagtaaacgaatataatcttgtgcgcggtgtgtatcaataattttacgcagtcgcgtcttctcgctaccttctccataaatatcaaatgttaattctggcacttgtcgtttagccacgataaccgctttgacaagccaatcaatatgtttctcattcgctaaacgagatgcactaatcatcgcatatggctttcttgataatgttggatatgataatgcatcaatgcttcccacaggaatagtataaacacgtgggcgataaccttgatattgctcaaattgtcgacaaaccatatgattttgaatatctgttgctgtaataaagaaatcaatgtatttagcttttgaaaattgatattcataataattgttccatagtatatgctgctcactcatcatattattactataatgatcagcatgaatcacaacaccaactttactatcacctttatgctgcaaaacagcctgaccaatatcagaagcgcggtctaatatgacaatatcgtctcgggttaaattcaatcgttgtaaaaagtatgcaataaattccgttttgttatacaacaccgcatcttcaaacacatatatagagctgtctccatcaatatattcgttataagcgatggaaccatcttgattataaaattgtcgcatatataatttcgctttattatcagctggtgcataatactcagaaaatatgcgcgtataactataaaaatctttacgtactaacatactattaattacaaattctgcacgatccacaatatctttttgttcattttgcagataacatgttacaaatgatgatttcccattaaaatataggcggactatcttaccatttctttctctaaaactaatgtcatgaccaagctcacgttcaatgtcatctaacgtgtacgttgttggtgctaaagaaatatcactaaaatactgatacaaccaaataacttcttgatctttaaacccaatgttttgcgttaatgtctgtatgttctctgactgtataaaatctaaaaacacaaatttagtgtcttgatttgtacgtctcaataatttagcacggtaagcttgtgcatattcaacaccgctactcgcccagcctataccaaagtttatattatatattgtcatgcgctaccccttttcatttatggaaaatgtataactggcataccctctttatcaaatgtaatcatgctttgacaaatatttttcaccattctttttttgatatttcgtgtcataacttcaaatgaatctaaggcaactctatggtattcaaaaatagcgttacgttgcccattttgtcgttgattaacgcttgcttttaattgttgtaaatagtcgacttgttctaaccaacatgaatcaattgctttcaaaaagactttttgaacgaaaatattataataatatgcactttgcatgtttttacgattcaaagctaattgcttttcaaattgctctaataaaaatgtcactactgcttgcttatctttaaaattaacacaagccacatctttattaaattggaaacttaaattttgataaatatactcgacaacacgcgattttgttagcaccttttcctcatttacaaacatttcaaatacatctttagctaacgctttaaaatcttgattctcagcatcatctatttctaaaactcgattgcgttcctcgtatacaagatctcgctgtatactaatgcttttttcaaattcattagccatttcacgagctttaaccccttgttcttccgagatacgctgcgctttaactacaatttgcttaactttgcgattaaacaaattactttgcgataatcgttgtgcatctaatgaatataattgattattttccgctaaattactatcgctccatcgcttaactaaataatcatctagtgaaatatatatacaagatgatcccggatccccttgtctaccagaacgaccacgtaattgcctgtctacacggctattttccatatgttcatgaataataacagctaatccacctaatgcttcgacaccttcaccaagtttaatatctgtgcctcgacctgccatactagtcgcaacagtcatggaaccaatttgccctgcttcagctatcatctgcgcttcttttgcaacattttgcgcaatgagtaaattattaggaatatccatttggaataatactttcgaaaagtattcagccgcttcagcagttctcgttatgagtaaaaccggtcgccccgtttcatgaagttcaactatatcatgaatcatcgcgatgtttttctcatcaactgaacgaaacactttatctggttcatcgatacgttgaatcgctttatcagttggtacttgtacgactatttttgaatacaaatcaaagaactctgattcgcctaattttcctgtagctgtcatacctgaaaatgattcaaaaagtttaaataaattctggaaggtaattgttgccataacacttttatctgttgaaacctccataccttctttcgcttcaatagcttggtgaagtccagcttgcaacttagttcccggtaacatacgacctgtaatacggtcaattaaaacaatatcaccattatatacaaagtaatcgacattagattcaaacaaatattgtgcgcgcagtgctaaattaatattacgcactaggaccatcgcttgttcgctatataaatcttcaacattaaagtatgattgtgccgcttcaataccttgatttaacagccatatttcttttttggtcttcttcattttaaaatgcacgtcttcaatcaatgtatctacaaactctttcacaatatgaaatagatttgattgtaatcttggtgcacccgaaataactaatggtgtttgagcagcatctaaaatgattgaatccacttcatcaataataccgtaatttaattgtggtaaaaatttcccttccgcactatcagccaaattatcaattaaataatcaaaaccgagacgtccattagttgtatatataatatcatgttcatatatattacgtttttcccctttttgatactcataatccacaatatcaacaaaacctaatgaagcagttaaacctaaccattcatataatggttgcatctcttcaaaatctcgcttcgctaaataatcattcgttgtaattaaatatgttccttttcccgaaagagcatttaaatataaaggcatcgttgccgttaatgttttaccttcgcctgtttgcatctccgcaatgttaccttcatgcaatacaatcgctccgattaactgaacttctttaggatacatacctaatactctccagctcgcttcacgtgccactgcataagcttcaggtaacaatgtatctagtgtatcaactcctgatgctaaacgttctttaaattctattgtcttttgttttaacgcatcatcagaatatgatttaacttcatcgctccatgtattgatgcgtttcactatttttctaatcgactttagtcttaattcgtttatcgtaacatctagtttatgtttcatttacttccccaccattcagtttcgatacatctaagtaatctaaaaatcgtactggattcattaaacgtgacatataatttagatgtttgtcttgctcttctttaaaataaacctcgacatttgtatcttttagttcatgatttcctgggacatgttctgtaagccatccttttaaatcatcatcttcatggcttgtacgatacactttgcaacccaaatgctgagcgacataagttgcaaaaacatttgactttgacccataactaatcaaattaatagcctttagggtatcttgactttgcaaatcattctttagttgcttaatatttccctcgatattgtcgtccatccaacgttcaacgagccaaacatgaccaaacagtttcaaaaaatcattcgaaatagttggataggtgtcagatggttctgcaataatgacattgatcatatcatttccatattggtcatcgcctatcttcgtcacccgcatgcttttatactctaaatcatattgatgcgtcatctctgtgattgttaaacatctaaatataagactcgtcgatgctgcattcatcatttttattttataagcataggcttcatcaggatattgaatcgtaatactatttgactttacaatctcagtacttagttttgtgccatttttattataaaaaatgatgataaaatacactgaaccagcaggcgttgcatcaaaatcaaaatgcaatttataatgctgtcctctacgcaaaattggtaaacttggcgcacttttatattttgaaaattgctttaacatcaaccactcatgaatcggtaatccagagggcatcaaaggatttataaaagtcacttcaccatttgaaaatgatactttagagccatacataaatgtagtttgtgaaatataattccaagtaactttaaatgttttgtttttcagcatgttgaactctcccaaacttgtcttccaaaataatgttgtaaaaattaacaaaccaacttgcaatggtaggtgaatcatcattatgtcgcccaggaatactgcgattcatcactcttgcttggtgtgctgtcaatacaggtaatagctcttgaaatgcatgtggatcataatcatcatgttgcatatatgctatggcaaaaacagtttgtgacaatgatttcttttgaaatgtttgccaaaatttttgatttaatgcctgtatcgacgcttgagatgtatcaccttcattagacaccaggacgtctaatgctgtaccgaactcttctggtctaagtaatcgcatatgttcagcaatcgttccaatattaacaagtggtttaccaacaataattgcctgaggatttaactgagcaccataatacaaggcaccaaatgaacccatagataaaccagataatattaattcatgtgatttaaaattcagcttttctaatgtctcgtcaataacattgataataccttgttcatattcagatgaaccgatataaaaactaccaccttcaacacgaggatcgccgataagtaaaaacggtgcattcatacgtttcatcatataatatccttcgaaaccttccgctgttcgataaccactaaaatatacgtttagtggcggtttcatatcaccagggtggaaataataaataaattcctgtcgttgactatctacgaaacgactaccaccaagtaaaaattgacccatgtctaatctagaccatcgtttgtgtataggtcctaaatgtaccgtcccgttcccacgcgccttaacagttacacttatataagcatcaaatggtttcgcaggtatctctaaaggactgtctaacatatcatcagtcaatacgatttgttcaattaatgcaccatcagcgccagtctgaatcaatctaaatgtatattgcaactcgaccgcaccatcaatatcaaattctggccatatttgaatgactttatctttatcgtaaacgagattattttgccaagatgcgataggtttaaattctttcccaaattctccactcaatgtgagctctgaattaccttggtaaacgacatctcctttaaaattcggatgcacaagtgctaacttaggagaaaccttatctccatactgtcctgagaagctaactgcctctaatttattattacgttcttcaatattccggtaatgtaatggttgaacaacgtatttttggacattttcgtcttgttcatattcaactgaccaaaatgattcatcaacatacgtattgtatggttcgcttatcatttgtaataaattcgttaatgtctccgagtatggtgcttgaatatagataaaatcaaagcgcccttctgcttcaacaatcgcttcaatagcctctacataaccactatcaaattcaaacaatccaatatcgaagtaatcccaactcacaccttttttgtgttgaaaaataggttctaaatcgtctcctccaatttgcaaaactctaaatttacgtggcatcattttcaccttctattaactcatcgagctgattaataatattcttagaagcatatgcatctattaattttaaagaataggcgtacgcataattccaatttttcaaataaaataaataataatttaacgcatcatctaattcatcaactgtatttataatacggccattgtcataatcagagacgtaatctgtttgttgaccattaatttgtggaatcccagcgctaattgcactaatttgtaaatacaagtcaggttcttttgacatatctatcacaagtcgcaacgtccgcaatgcttctacaacatcatgttcagcatgtatcgtcttaacagcaatgatgtcatcttgatcttcaggtgtcattaatgctgaaacattaacatccgcattctgtttagcttggtattcctcatttaccgacgtaatacattcacgaagccacatcggtatgtcattttgatggcgcgataataaaattaaacggtaataatcttcctgtgcgatataatccacaagtcgttgcatcatttgttgcaaatcagcgtcactcataccatctatccatacacctataaatgtttccatcaattgactacttatattaggtgattgtctcgtttcaaatggtgtgattcgaatcattgtattctcccgctgatacttctcttgatgactaattaaatcacgttctagttgcacactatcaacaattaaatgggcattctttacgatagattgatattcctcatctgacacagtttcatttctatttttaaaaaatgaataacttaatgatttcgctggaatatgattggctatttgtcgattgtgcctagcatctgaagccacaatcacatgatcatcttcatgtatttgttgtgcaatcattgcttgaaatttttcttcaattagttgagccatattgttatattctgtttgttgatagtgatgttgatatctttttgaaacagtgactctgccatttttcaaatcttcatgaagtacacaatctccattaatcgttaaatattcttggtaagaagcctctccctgatcatcaaaataacgtatcgctgataaataacctctgtcatcaaaaatataacgccgttgtaactgatctctttcaaattcttcaaaccaaattgaatacccttcttgactaaaataaatatttgtataggtctgttcactcgtcacacattttaataaatacggtgtgtacacaaactcaacatcatccggccattttaagtgatgataattaatcgcttgtggcgcatggtgactgaatccttgaatttcatcaaacacagacgaatactttgtctcatataagtcatatcgatgtaaaaatgttcttaaatttggtgcatgattgagaacaatcagttgataatctaagtcattttcaaggtgcattcccattaaactaatcatatcgtcaaattccgtcttattttgtagttgataatacggcacagtcgtgtcttgccaccatcgttggtcatcgtaccaagctggaataaagtatttcataattacctccttaccaatactggtttaaaaatggcttatatttatcaaaatataaatatgtacgaattgtttctgcaatattaatactgatgtaaactaatacaatcagttgtactgagaaataaatttcagtagataaatgcggtacaaacaatgtgaaataaagcggtataccaataatgactgtaactaatgccaatccaaaccaacatacgcgtcgtgcttgataatttaaataacgttctgtatccttaccaggtttaactcctgaaaaataattgccactctttaagaaatctttggatttttgtttagtattgattaaaaatctcgataaaaaataacccaataacatttgaatcactaaatatactgaaatacctactggactatcaaatgtcagcattggcatgtcatctgatatgcttttattaaacatagataaaataaaatgaatgccactttttaagaaaacaaaagctgaaatactcatcattaaagtaatactgcctgcagggttaactttccaagataaataagatttcatatttgttgcggaaacgttcattaaatcgatatatggtattctcacttctactaattcaataaataataagataaacaatgtgattatcacaaggatgattaacaacgcaatcacaatatgacttgcatctatatattccattttttgatgcatcattgatttaataatactaaccattacaatcggcattggtcctgcgatgccgtagcgactatttttgtcagctaaccaaactaataacatcgttccagtaaccaaaatcaatattgttaagtaaatattgtcttgatgaacacgttctttcgaaacatattcatgaatcacaaaataactttgaataacacttaaaattaatgttaagatgcgctctttataatgcttctcaagacttgtttgtttcatgtatttatccatattccgataagaaatcagcatcaagataatcattgatgttaaccacggacctaatcctaaagtgaaaatgtttaaagtattaacgtctccacccatattagaaatagctattttaaaaaatgactcatgttttacttgcatatcgttataggaaacgatggaaatgtttgtgcctaatatataaataaacaagataaaacatgtgtatagcatacgtttatatataattttatattcgtattgttgtaaaagttttaacatgttgcacctcttttatatcaaaaacattaaaaagactaagggttcatcactaattattaaaatcctatatcgatttttctagtgattggtgcctcagtctttttaattttagccagctataaattcaatttatgcttgagaatcatcttgatcattttcatctttctttttctttctcttcattaaacctaaaccaactaataatgtcataacgccacctagtaatccattttgttttattgagtcacctgtatctggcaatcttttttcactttgtgctggtgtgccattatgtttagtcacttcagatgttgcacttaatgtagactgagattcactcgtgctcgttgttgcttcacttgataagcgagatgtgctcgtgctgtgagtatgatgcatactcattgagtctgacggatgcattgagttagattcggatgtacttgttgagccggacatacttgttgatgttgagtcagaaatgctttgtgaaccagacatagatgtactcagtgattcggatgtgcttgtcgaatcggatgtgctcaatgacgttgatgtgcttgttgacactgattctgagtcactaattgatgttgagtcggatttgtcttgtgacattgaaacactcgatgaattagattcactcattgatgttgagtcagatacgctcgttgaacctgaaccagacgtacttaatgattcagatatgcttgttgaagttgaaccacttgttgagtccgatgtacttgtcgatgtcgagtctgaatctgatgtactcaatgattctgagtcactgatagaagttgaatcacttgtagattctgattctactgtactttgtgaaccactgatacttattgaagtagaatcactgatactgtctgatgttgataatgatgtcgacaccgatgtgctttgtgatgacgatgtactagcactcattgacattgatgttgatatcgatgtacttaaggaaccagatgcacttgtacttgttgactggctttgtgacattgaatcacttaatgatgtagatgtgcttgttgagctcgagtcacttacacttgttgaacctgatattgagtcacttaaacttgtcgatgttgaaactgatacgcttccgctcattgagtcagatgttgaaagtgatgtactcgttgaatttgatccactgatgctagacgaatcacttgtagacattgagtcgctttctgatgcactgatgctcatagagtcaaattgactattacttgttgagcttgactgcgaatcgctcacacttgttgacgttgattctgatccactcatactttgcgagctactcaatgattttgaatcacttaatgaatccgaagtgctaagacttgtggaaccacttaaagatattgatccacttaatgagtcggagtcacttgtactagtagaatcactcattgatattgaatcacttagcgaggtagactcgcttacgctttctgaaccacttaatgatgttgaggtactcaatgaaccagatgtacttgttgaagtcgaaccacttgttgattttgaatcacttaatgaatcagattcactcacgctttctgaacttcttagtgacgtcgatacacttaatgatgacgaatcgcttgtgcttactgaatcgctcatcgattgtgagcaactcaatgaacttgactcgcttacactttctgattttcttaatgacgttgagacgctcaatgagccagaatcactgacacttgttgagccactcatcgatttagagtcactttcagaattagattcacttacactttctgaatcatttacagattctgacatactttgtgaatcagatatgcttgcgctcattacttcactagccgatgttgatgtacttgtcgaatcacttaacgatatagacacactcatcgaaccagatgtactcgcacttgttgagtctgatgttgaatcactaacactatcagataatgacgttgaatcactcatacttgttgatgtacttgtcgaaagcgacatactttgtgaatcactagtacttgtacgcatcgaagtactagttgaagctgatgtactacgagagtcacttgttgatgttgatgtacttgctgatcctgatgcacttgtacttcttgatgtgctttgtgaatcgcttaatgatgttgatgttgaatcggattcacttgtactttctgatgttgagccagactctgatgtacttaccgatgtagataaacttgcaatggtcgacatgcggtttgaagttgatgtacttagcgaatcacttaatgatgctgatgtgctttgtgaatcggattcactgctttgcattgacgcagatgttgaatcacttaaagatgttgacgacaaatcggattcacttgcgcttgctgagttactgagcgatgttgacgtacttgctgatcctgagttacttgtacttgttgagtcactgagtgatgttgacgcactttctgatgttgactcacttgcacttgttgagatactttgtgaatcagattcactctctgaaccacttaatgacgctgatgtgcttaccgaacctgattgactcgtacttttagatatacttgttgaatcgcttagtgacgttgatgtcgatgtggattcactttggcttgttgactgacttgtatatgatgatgtgctttgtgaatcggattcgctcgtgcttgtacttgttgagtttgaggcactttggcttgctgagtttgagtctactccgctttgattcattgaggcacttagtgacaatgatgtactcgttgagtcagacaaacttgtactcgttgacgtacttgtacttcctgatgttgattgagacatacttatgctcattgatgttgaatcggatttactttcacttgatgatgttgagtcggattcactttcacttgtagaaccacttaatgatgtggatgtactaatggaatcagatttacttgtactgattgaatcacttgtcgacattgatgtacttaatgaatcagacttactatcacttgtggaatcacttaatgatgttgacaaacttgtagagtcagacaaacttgtactcgttgacatactcagtgatgttgaaacactctcgctcttaaacgttgacgttgattcactgatacttgtcgatgttgaaatggacgtactaccacttgttgaattacttaatgatgttgatgtgctaccagattctgatgtactgtctgataatgacgtactctcacttgtcgaactactcactgactctgatgttgattcagacgtactttcacttaatgattcacttaaaaaggcagatgcactttgtgattctgaatcgctagtactatttgattcacttaatgatataaacgtgctctctgaagcagatattgcttcacttatagagtcgctcgttgacgttgattcacttattgaatcagactctgatgtacttaagcttgtggaatcactcatagatgttgatgtacgttctgaattacttgtacttaacgatgtcgaagtacttaccgaaccagatgtgctcgtaaaagcactttgtgatattgattcacttgatgcagttgatgctgatttgctatcactcgttgaatcactaaacgacgttgatatgctcattgaatcggattgacttgcactcattgaaccagacgtactttgtgattccgaagtacgtactgaagcacttgtcgacgttgatgtacttgttgaacctgattgactagtactttgtgataatgacttactatcagaatcagatgtactttgtgaatcacttaatgattctgatgtactacctgactgagacgtgctcattgaactacttacggacattgatttactgtctgatgcagataatgacccacttgtactgatagagtcacttactatctctgaagtactcatcgagtctgatgtacttgttgagacactttgtgatgctgctatgcttagtgatccagaaacagaaccacttgtgctcgtcgaatcgctcaatgattctgatgtactcatcgattttgaatcacttgtacttaatgatattgatgtactttgtgaatctgatttgcttgttgacgcactttgagagttggctatgctatttgaaatactgatagagtccgaggtgctagctgactcgctcaatgatgttgatgtactaattgcattcgatgtactgtcacttaatgatgctgatgtactagacgaccctgatatactcgttgataagctttgtgacttagacaagcttcctgatgtactcatacttaatgagtcactgagtgatgttgatgtacgcaatgaatcagatgtacttgttgatagactttcggatttttcagtactgctagagtttgaaatagaatcgcttaatgatgttgatttactagctgaatccgacatgcttgatgatacactttgtgaattcactaaacttgtgcttgttgagcttgatacactattactttcagatgtgcttaatgacttagatgcactcacagaatcagataggcttacacttgtcgatttcgaggtactagctgatgtagataccacaatcgatcctgatgtactcgttgatgcactttgtgagtcagctttacttgttgacacactttgagattgttgtgtacttcctgatgttgatacggaatcactcatgctatttcttgttacttcatatttaaaagttgtcgtcgttttgttaccgctcgcatctgtagaaacgattgatatagtacttgtaccaatgtttgttggtgtaccactaatagtattatttgtactatcaaatgttagtccggatggcaatccagtcactgtattcgtcaccgcatttccactgttatcttgcgtagcaattttaatcggggatattggtgaatacacttctgatgattgatctcctattggtgtcactgttggtgctgtcgtatccacaacatttattgtaaaagttgtcgtcgatttgttatttgcttggtcagtagacacaactgtcactgttgattgaccaatttttgttggtgtcccaatgattgaattcgttgcactatcgtaacttaatccgcttggtaatcctgtaactgtatttgtcacagtcccagtaccattatccgttgtagtcaatacaataggattcattgttttacccacttctatggtttgattgcctacagttacagttggtgcttttacatcagtaaaataatatgtcactgattgtccagcattcgtcatttttacagttttatttgtatcattataagttgacgcatatgaactatcgacggacgtgtagttatatcctttagcagtcaatgcagattgctgattatcgattgtcacgacttgatcaacatttcctgaatatgtttttggtggaataatatctttacctgttgttacatcaacgtatctcacttgtgtaacagcagactctgtatattcgaatgttccaaattgtacttgttgtaaatttgtcgcgccacctgttgaggctgtcattgataatgaaaagttggtcgtaccacttttcgcaatccaatctgaaatattacgtgtccatgtttgacctgcatatttgacagtcataacctttgtatcaccattatagttaatatcaaaatcttggaacgtgttatttgtaggttgaacatttaacttcgcagcattatcagctgttgaacttgatgtatacgttgtcgcaacaccataactatctgttgttacaaatgcaccaaacgcacctccaccagctacattagatgggtcagcattcgcctttgcagctgaatttggtttagatgtattgtgatacgtatccaatttgaagccaaatgcgttacttaagccaccaatacctactgcggcaccgtttaaccctgtttcacctaatacacctggtgaaaaggcaaaaccgataccatctccaccatttccatgcccttcatatttgttacctaaatttacttttccagaaaaatgaaaactcttattagagtcaatacgtgttcctaatgtaatagcacctttttggctgtatgcatcctgtgttaacgtcacaataccggtactttgatcataggtagcattacctgacgttgtcatatattgttttaagttatctttattaactgtaattgtattagcagttactgcggttgtcgtcgctgctgacgcaaatgttgacatagctaagcgactgaaagttcgaagttttactggtgcggtgctagttgacgttgtgctagttttgtttaagttgaccgaagatggcgttgtgctttgtgaagtgttatttgatgcagtactttgatttgttgatgtattaattggttgttctgtacttgaagttgaagctacagatttagtatcagaacttgatgtagtattctttgaggatgttgattctgatgtagatgtcaatttctcttgttgattgcttgtactattagttgtcgaagtgaccttttcagacttttcacttgagactgtgtcactatttgatgtttgtaccgaactactatttttcgttacacttgtggaatcggctgttgatgttgatgcttcgattgtcgttgagttttgattacctactgtttcactttgtgtgtttaattcagaagttaatggtgcatcagaagccgcaaaagcttgctggtcatgcaacatatttaccgtgaatgcaccaccaataaccgccgtagttttcagtccgtatcccgtcatttttttactaatgctttgattatcttgactcactaaactatgactaataaatggtagccccataattttgaacatttctatttctttaattccggattttacccaattttttccagatttataaagtcttactcttgttttttcgtttgctaagctgtcatgaaatgctttctgtcttttactcatgtaataactccttgtattatctttacattcattagattataatatatgccactattcaatttaatacaactcttttttgatacaaaaatactcattttgttaaaatttgtaaaaattcatttttattcgtctaaatgtaatcgttttcatatttttaaaattactttttctcgtttatgcgtataatctttttttatataaatttggctaattggctttatgtttaatcattataattgtttcgtttttaaaataattattgtattaatatatctataccatccaccttttatttataaatagttaatttacaactaaacgataaatattatatgcaaaatacatctttaatattaaagtaataccaatattttttcaataaacctagtgtaatatatgtgtaattctaaaagattcttctttaaaaatataaataccacgacatattgctttaacattttcatttataaagcgaaaaaatgcatcgctactaagttgaatgtttagtaaggatgcatttaattcactaaaatgattaaattacttatatcttttcatctgattgattatcgaaatttcttccttctaaacctgctaactcttctttagaagctgcaggtgctttcatttcaaatatctcattcactactgtgtaatcgtaatatcctaatctggcaataggtttaatcgacttaatgtccaatttaccattatcaagaataaccttatcgtcaatatgaacttgggcaactcttcctataacaatatctacggtagatactggatctccagttggaatacgaatcgtttgaacgtactcacattcaaaatgaactggcgattcttttacacgatatcctggagcttctatacatttttcctttgttacatctgcaaaattaaattcatcctcttctggtggcaatgctttcgatgataaattaactgcttctcttaaatcatacgttgccatattccacacaaaccaacctgtctcttcagcatttttcactgtatctttacgttcgtgatcaccaagaacggattgatttgctgcgaacataaccataggcggatcccaagttaagttttgatactgactataaggcgctaaattatctttcccatctttcgatacagtagagatccaccctattggacgtggtactgtactacttttaaatgggtcgtgcggtaaaccatgacttcttacaccttgttttggcgaataattcatactatcttcaccccttataagtaattacatttaaggttacgccctctttacataagcgtctaatataaataaacaatttatttataagtagaaactatatatgacgtggttgcttataatttgcgttcttgattcgaaaaattcagataaggatttatacaattaatatttatgatatcttttgtaaatttaattaattatagttacttcaatcatgattagtttataataataaagtgaaattgaaaaagacagctattatgcgatgagcgaaaaacttcaagtaaaacaagaatttaacggcgttacaaggcaatacttgaatttcagaacagatagtatcgatgatctggataagttcaaaaaagaattcaaacctgttatgcacttaaaaggtgatgcattcaatcaacagttacaatctttgattaacaaatatccacaaatacaaaaaaatatgaaatcagagttcattgcttattatgataaagaaaaaaatagagaaacagtaaaaaactatgcttggaaccttcaaaaatctataaatgacattatgcaatcatatcctagcacaaaatttgtacagttttataaagatgatgtttccccgtcaatggtagatggaaatggccgtttaaaatcggatactaatgtaatttccatcgagggaggaaagtatgatgagaacaaatgatcatataaccgatttagatgctattgagttaagtagcggttggaattacaattcgaaattggagactggcaaaaatgcactactatcagatagccttttaagagatattaaagtattaagttctaatgctaaaggcgacgctgacatactagaaacagaacttcgtgctgtaataaactcaatgtctcaaaacgaaggtaaatctgttgatgcacttaaaaatagtaccgcttctctaaaaaacaatctaaccaaattaaaagagcaactcgacaaaactacacattaatttcatacattttgagtgaacagaattatatttccatagcaaacattcctaaactacacatacgttacataattgattcatttttatagaaacgggtaaaaatgataaagtaatcatctttcacaaaaaatcaaatattgggaggaattaaatatgattttgcgttacgcaacgaatttaaaacttgcgaaagagctataccaagccagtaaacctaaattgcaagaagataagggtatgattgaactgtttgaacatacttttggcttgcaaaaagaacttgtaaaatacgtcggcattgcagaagcaactactgctgctttatactcagctagctttatcaataaaaacatttctcgccttgcatcactatcaacgataggcattttaagtgtagctgcttacaaacatttcgaagctggccaaggtaaaaaaggtgcacaacatgcattaaatttattaggtcttgctactttaagtttactagatacattttcttgtaataaaaaatagtcttcattttagaagcacatactttagcacctgtgtacttttgattcaattcataaacggtataccgctatagcatgtgttttattatttttctggtctctttatcgtaaatattccccctaatttagcataatcatttccggctaaacgagaaacagcctgtaatgcgtgtggattgattttaaaatcaccctcataaatactgtcatcaatatgataagttacaatttcacctattattaaatcagccccatctaatacatctccaagcaatatcatttgcgatagtttacattcgaatctcattttcgcatctttaattcctggcgtcttaatcgttgtagatgttaaaagtgataattctgtacgactcaactcactgtcaccatatgctaacggcgctgcagtctcattaatatcttgaacattatcttcgtctgtaatatgcacaacaaagtctccagtccgttctatatttaatgcagtatcttttctcttacctcctgcacgttgaactgcaatagcaatcattggcggatgattattaacaatattaaaaaagctaaatggtgctgcatttactgatgcatcttgatttaatgttgtaacaaaagctataggtcgtggaataattgaaccaattaataatttatagttttctctagcagttaatgattgtgcatcaaacgtatacataatacctacctcttttctaagtatatctaggtatttctccgattttggttaatttaaacatctattctcctctgaaaatcacttgtatttatttagcaaatcttttgaaatatgacacatatgcatatcttctggatatttttctaaatgttgctgatgttcttcagcacttttaatgtagttagacagcggtaagacttccactgcaatttgatctctgtctttacgtcgttcaatgaactgacgcgcttcaattaagtggtcatctacacaactatataaacccgttcgatacttttgtccaatatcatttccttgttgattcacactgtaaggatcaatgatttcaaataaataattcataatgtctgtaattgttaacatacgatcatcgaaatgaagtttgacacattcagcataaccatcatacggaccgtctaatttagagcttcttccatttgctcttcctgcttctgtatgtataattccaggtattgttgcaaaaaatgcttcaacaccccataaacatcctcctgctacataaacaactgccatatttacacctcatcatccttttttatatttttaacaaggttataccatttaataccgccatgacatgattctgatacaccttcattacgatacccatatttttcataaaatgaaattaatgattctcgacatgttaacgttacaccatgtcgatgatgattcttagcaagagtttcaaaatagtttagtaagcgacctgcaataccctgaccttgataatttggtgctacaacaagacctaacacactaatatagccaccttcactattatttgtggagacatttttaaataaatcatcgctaatgtaacgctcttttatgactggaccgttgatgtatccaattacttcatcattcttttcagctacaataaaagtttcttgaatttgttcaattctcaatttcaatgcctctcgtgttgcagcttcttccggtgaaaaaccaatattttcaagtgcaataatttgatctaagtcctgcatgattacttttcttaataccataaaaacacttccttagccctatatatcaaaagtaataccttcatctttatattcattattttcaaactaccttcactataaaaaacgagtctttttattgaaagccattcgccttaatcaattagacaagttgtattatacgaattagtaaataatcatgattataattcattttaagcatactcaaaaagactggtacatgtataccagtctaattcgaaaaaatatatttagttaaaaccatttcaaaaacgacttcacttttcctggcttagtcggtctgtctaaataaacaaaattatcattgattactgaactggcatttcgaagtaatgcttcaatatcattcgaatatttcttcaatttatgattgtgaaataattcttgcatcaaaaatggtctttggtcacatgaatgtgcatctgaagctacaaaatgagccaaattacattctataaattgtaatgataacttttgaatgtttttaccaaatccaccaactaaagaactcgatgttaattgactcagtgccccatttgcaaccaattcatataatatttccggatttttggcgatacttctatttctttcaggatgtgcaatgattggtatgtaacctctcgattgtatttcaaaaaacaattgttttgtataatgtggtacttcgcccgttggaaattcaattaataaatatttcgaacgattaataccttgaatactaccattatctaagcctttcagaatcgaatctgtaattctaatttcttgcccgggaaataatttaatatccaatgcttgaacttctggatgcgttcttaactccgccaatttcacaagcacttgttgaaatgtattatcatatctcggatgcaaatgatgaggtgtcgctacaatacttgttacaccttcatccttagcttgctttaatagtgcaatactcttttcaattgttttaggaccatcatctatatcaactaatatatggttatgaatatcaatcatgattcatcagtcccataatatgcatagtaactagcacttttatctttaggcattctatttaagactacacctaataatttagcacctgttgcttcaataagttcttttccttttttaacttcatctctattattattttccgaattaactacgtagacaacattgccggtaaactttgaaaataattgcgcatctgtaactgtgttcactggtggcgtatcgataattacaaagttataattcatcaataatgtgtcatacaaatttgcaaatgcccttgatgtaattaactctgacggattcggtgggattggcccagacgtcaagacgtctaaatcttgaatttcagttgagataatactgtcttgataagttgaccaatttagcaataaacttgataggccttcattgtttggcaaattaaaaatataatgctgcgtaggtttacgcatatccccgtctacgattagtgttttataacctgcttgcgcatatgcaactgctaaatttgctgcaattgtagacttacctgcgcctggtgcctctgaagtgattacaatgctttgaactgcactgtcaggatttgcaaacataatatttgatcttatgcctcgaaatttctcgctaataggtgactttggttgttcatggacaattaaacttgatgtacttcttcgtgtattcgtcatggtaattcctcgtaaattaaaatttttgtattgaacctaaaataggtaatcctagttgcgattcaacatcttcttctgtcttaatacgcttatctaataattcttttaagaaaataatcaatattgctaaaacaataccaacaataatgctgataactaagttgacagatactattggagatacttttacagcattatcatgtgctgaggaaagtatcgtaacattatcaacactcataattttaggcatgtcatgagcaaaaactttagatattttattaacaattttgtcagattcagatttattcccagtggtaactgatacagtaataatttgagagtttgtttgattggttacttttaaaaatgaattcaactcagctgttgaatactgaccatcaaattctctagatactttatctagaattctaggacttttgataatttccgtatatgtattaacagactgcaaactactttgaacattttggaaagctaaatcacttgaggactttttcatgttcactaatatttgagtagaagcagtatatttgtcaggcataacaaaaaaggttaatgccgcacttactacaagacatattgccggtaaaataagcaataatttaatattcttctttagaatatttaatagttttactaaatcaaacttttctttcatggtttcctccacataatcaatcattgtattcattatgtatgttttataaatcggacaattatatctagtttaacgaccacaaaacatacacaactacattttctctaattatttatataaatattttatcgtttaaaattatatcatgattctctaccattatgtataacttatttatatttttgcacaagatataatattgtccaactttaaatatccaaacctattaataataaaactagataccatcgtactctatcatggctttcttataatcgagtagaagcatcatcattacttgattatttgctctttacaacaccgagcgtgcccgtactcggtaattcaataccttgcgtaacccgtcactgtgagttgggttaatgataataaagcccacaccttttaaaaagatgtgggtaatttatataatttttatttacatttttaacttataaaaaaagcgcctatgtcatgatttaccatcacataggcgcttatcaataaattattacttattactttccatttcatctaatttatgcggatttcctgtaattagatgacaacttattcttttcaggggaacattacacttttataatatgttcaaagacaaacttaaccattcacaaatataaagaataatattatcaaatcattgaacaaatcgtattttgcaacaattgatatttatattaatgtattgcatttaatttataaaattcatatacatcttaatattctcaatatcgatttgtattgtcaactttatatagatttaaaaaaataatctcatgtctttttttacaaaagtaagttaattattacaaactagtaacaaaaattatttcttcaaaaatatatttagtagcgaatacacttcatctttgaattgacttttactttcttccactgctccaaatttttgcgaaaaggatgctttcaaataccaactttcaagaaacagcaatattaaattctgaaagtcttcttttgtcatctttatctttgattcatcatagaattttgctatctctttacttaatgattgatttaaatcttgtatttgtccgtaaatatttccagaaaattcctcaggcgtattagataattgaacgtacattctaatatacctttcttcgatgtcgaaaataaactcaaataagaattgatataaagcatcaattgaatagttcgatttattttgattcatcataataatattattaaggtaatcaaaacaacatttaacactttgttcgtaaatactttttttcgagtcaaaatggtaatataaactcgctttctttatatttacacttttagctatatcatcaagtgttgtaccgtcataccccttctctgaaaataaggttattgcgttatcaataatcttatccttcaatttttataaccccctactgaaaattaatcacactatgttacaggaaaattaagttgcaattacaaatatttccgtttaattataacaacaatctattgcaaattaaaatactatcaattaccatatggcttacaacctaactaacgaaaggtaggtaaagaaattgcaattttttaactttttgcttttttatcctgtatttatgtctatttactggattgtcggttcaatttatttctattttaccagagaaattagatattcattgaacaagaagcctgacataaatgtggatgaattagaaggcattacatttttacttgcctgttataacgaaagtgaaacgattgaagatacgttgtctaatgttcttgcactcaaatacgagaagaaagaaattattatcattaatgatggaagttcagataatacagcagaactcatctataaaatcaaagaaaataatgactttattttcgtcgatttacaagaaaacagaggtaaagccaacgcactcaatcaaggcattaaacaggcttcatatgattatgtaatgtgcttggatgcagatactatcgttgatcaagatgcaccatattatatgattgagaatttcaaacatgatccaaaacttggtgcagttacaggtaatcctagaattcgaaataagagttctattttaggtaaaattcaaacgatagaatatgcaagtttaattggctgtattaagcgaagtcagacacttgctggcgcagtcaatactatttcgggtgtcttcactctatttaaaaaaagtgcagttgtcgacgttggctactgggatactgatatgattaccgaagatattgcagtttcttggaaattgcatttacgtggatatcgtattaagtatgaaccgcttgccatgtgttggatgttggttccagaaacattgggaggtctttggaagcaacgcgtgagatgggctcaagggggacacgaagtattactacgagacttttttagcacaatgaaaacgaaaaggtttcctttatatattttgatgtttgagcaaatcatctcgattttatgggtatatatagtgcttctatatttaggctatttgttcataacagcaaacttcttagactatacatttatgacatatagtttttcaatatttctactatcatcatttactatgacttttataaacgttattcaatttacagtcgcactctttattgatagtcgctacgagaaaaagaatatggctggactcatatttgtaagttggtatccgacagtatactggattattaacgcagcagtagttcttgtcgcatttccaaaagcattaaaacgtaagaaaggtggttacgcaacatggtcaagcccagacagagggaatacccaacgctaaaatcatcgctaaatattgtaagagaaacagcacttatcgctatatcttgtgtcttttggatatattgtttagttgttctactcgtttatattggtactatatttgaaattcatgacgaaagtatcaatacaatacgtgttgctttaaacattgaaaatactgaaattttagatatatttgaaactatgggcattttcgcgattatcatttttgtattttttacaattagcatattgattcaaaaatggcagagaggaagagaatcgtgaagtatagaaaatttataattttagtgttgagtatcttgatcatattgcctgtaagcacactggatggtcatcatattgcaaatgcagatgacgattcacctaaaaaactgaaatataaagaaaatagtgctctggcattaaattatcaccgtgtaagaaaagcgaattttctgaataattttatttacttcttttctagtagtaaagaaattaaaaattatagtgttagtcaatcacaatttgaatctcaaataaaatggctaaaatcacatgatgctaaatttttaaccttgaaagaatttttatattacaagaaaaaaggtaagtttccaaaacgaagtgtatggattaactttgatgatatggatgaaactatttatgaaaatgcttatccaatcttaaaaaaatataaaataccggcaactgggtttattatcacaggtcatgttggggaagaaaactttcacaacctcgatatgattagtaaaaaagaactaaaagaaatgtataaaactgggttatgggaatttgaaacacatacccacgatttgcataacttatctaaaaataataagtcaaaattaatgaaagcttctgaagctacaatcataaaagatttaaacaaaagtgaaaaatatctaactaaaaactttaaaaagtcgcagaaaactatagcctatccttatggcttgatgaatgacgataaattaccggtaatcaaaaaagctgggttaaaatacggtttttcattagaggaaaaagcagtcactccgaactccaatgattattacatccctagaatattaattagtgatgatgcttttgagcatttaattaagagatgggacggattccatgaaaaagattagacttgaactcgtatatttacgtgctattatatgtgcaattattattatcacacatttacttacacaaattactttaaaacatgaaaatatggagggtggatccttagtgttacaattttacattcgtaatattgtgatttttggtacaccttgctttattatcttgtcacagttactgacaaccttgaattaccaaaaagtcacctatagatacttaactacacgcgtaaaatatatacttattccttacatattaatgggattgttttacagttatagtgaatcattattaacagattcaagtttcaataaacaattcattgaaaatgtcctattaggtcaatggtatggctattttatcgttgttatcatgcaattctttattttgagttatatcatttttaaaattaactataacctattcaacagtaaaatattattattgttatcttttattttacagcaatcatttttatattactttacgaacaacacagcgtttcacgataccgtgctacactattatccattaagtgaaaatactataatattcggatggattttttatttcttcttaggtgcatatatgggttataactacgaacgtgtattaaatttcttagaacgttatttagttattatgattgtattagctgtagctacttattttgtgtttattgcgttagcaaatggagactattggaacgttaccagcttttcatattcattaacaccatataatagtattatgtttattgttatcttgggtatttgcacgcattttaaaacaatgttatttaatacgattcaaatgattagtgctttctcattctttatttatttattacatccaatcattctagactcattgtttgcatatacaaatatatttgaggataatacaatggtctttctagcgatatcactactattcattttaggattatgtataggtgtcggcatgatattgcgtgaattctatatctttaggtttattattggaaaacaaccatataaattgaacattaatgcttattaattattaagctatgttaaaaacacgcggtgggcgaaatcagtttgaattgactgacttcgttttaccgcgtgtttaatattgttatacatatattctaattgcacatttaaacttcgtaaatgccaatgggagtgggacagaaatgatattttcgcaaaatttatttcgtcgtcccaccccaacttgcacattattgtaacctgactttccgccagcttctatgttggggccccgccaacttgcacattattgtaagctgactttccgccagcttctttgttggggccccgccaacttgcattgtttgtagaatttcttttcgaaattctttatgttggggcctcgccaatgttttacttgaataattcttttagaattctaaataatgatccgattaattgaaagaagtctgcagtcattattaattcctccctttactttataaattatgcttgcttagtatcagtcagcttttcagttttcactaaatcgtctgctaaatgatgccaaaaatcttgtaattcttctcttgtgcgcactgtatcagaactgtcttgtcctacaaagtcaacatgatcccaatcatgttttgtaggcgtcacttgccaaatgcctttttgaattttatctgtcgcttttgtataagcttgattaaatggatgttgagaagaaataacggatactaaaccatcgttttctcgccattctttttcagtagctttaccgattaagttaccagtaatcacaaatgggaaaaacatatttaagtctgctttttgtctatcgctatttaatgctttgtgcgttgcttcaccagtgtatgttttatacacaatgttagggttcaacgacgttttacgatttaaatctgttgcaccctcacgcgtcagatcgtaaaatccattatcttttgatttccataaattagattgtttaacgcgtttgacataatcaatatatgattcatttggcttctgttttagaccccattgagccaacccgaagtctactcttgaatttttattaccaaacattttaccgatatcaaatacgatttgtctcactaaagcttcattaccagctaaatctgatgcgtgtgtaccattatgtggtgttcctaaagtagtaattgatgaaatcatattgtcatgattacctttgaatagtggagaaatttcgccaccatgtttcttttgatactctatttcttcacgattaccattacgcagtaattcttctagttgacgtatcgtttgaccgcccatactatgtccaactaggtgtaccttctgtcctggtttccagtctttgtaaattccttcgtatgtttttccataacgttcatgtccatattttgctgcatgtgctgcaccataatctacacgaccgcctttgatataataataaagttcaactgcgcggtcatagttacttccaaaagcacttatacttgcttcataagctttgtaaccattttcttctaaatcttggcgaatgttcattttattaccgccccaataatgagctaacactgaaggattaatatcatctgtaaacccattgaaaccatgcactaaaacgataggatcctgatttttatactgcccttgtttggcaactttattcgtttgatcatctttcgcttttgcagtaagttcctttgtccctttgtttggtaacgttgctactgcactactttttaataaatttaatccatttttcttgtcattgtcctttgttggttctactggtgatttttgattgttttttaaatctgaaactgatagtgttttttcgtctttttgaggtttcacttcttgttcattgttaaaattgtagttagtaattttatcattcgcttgattattttgttgtggttgtactttctctatttctgtctcattaacaatttctcgttgacttgtttgatctaacttatttaatgatggtgcttcctttattcgactttgtgaaggtagattgttattagcgtttgaatcttgactattatctgcctcttttgactgttgctgtgacgccactttactttgtttaccatcattaatagcctgttctaacccttgatttacatcgctaggattagcattgttattttttgttgtatcacgttgaatatttttattattaagcgatgattttttatcatcctttagttgatctttattcaaatcatctgttttacgatgattttcttctgatattgttttatcattatgcaagttcttagttaaattttcagtatgttgctgttcgtcaacaccgttttcacgttgataattagcattttccctagtttgttgatccccaatagattgtgctgtaactgtatcctcctgtgaatttcccatattcacttgcttctcagctgcttgtgcttgtccaccacttaaaaatagtaatgtagctattaaaatggaagatgcacctacactaaatttacgaatactatacttattttgacttttcatcattgtcagcacctctatttttttattttagataaacaaattgataattattcgaggaataaactcaaataatttacttaaccaagcactcataatgaccatcctttctattgtttaatttgacgagaaagcgtttacatttgtatttaaaaaatatattctccaaagagaatttaaagtgtatacgctaatcatttcaaattattaattaatattatatttggcaaaatttaattagtcaataattagacacaatttaattatgcaaattgtaacttttttacatatatcttttttgatttttaatatttacatgcttggggcttaattccaatgatgtattatttttttagattagctatatggggagatttatgagctattacagttattatgtttgctggtgtcgtattttaaacctaaaaatatcatcccatccacaataattgtatcaggataaaccgtaatacttgttcctaaactaaatatatacagttaattttcttccctcaaagtaagtatcctactatttttaatttattgtttaattactcttgaactacctttaacttaatctcgaatttatgatgattagcataaaaatacatcccataaagttagttttttagtctaactttcgggatgcatatcttagttctaatggagattgtcttttaaataggctatgacatttctatttcaggctagatatatttgtatttatagtataaatacaaagaatgtaaagacaactatgatattaataggtagtaacgacaaacataactctttagctttttcgccattttttcccttcataacttcattatatcgattcatatacttttcgacatctttaacagtgacatctattcctgagttgctcaatttactttttataattatttttgatttcgtattgtgattatccactacttatctataacgagttcgcaactttagtaccatcacagcattcatagttaaaatatgttggtgtcgtattttaaacttgaaaatgtcacgttttccacaatatttgtaagtgtataagccatgatccttttccttatatcttagtccatacttgctttaccactgttcgatattttgtcgttcacctttaaagttattgcgcttatgatgtctacgcgctaattccgcctcaatttctgaaaaatcgacgccaagcgcatgcatcaagacaaataaatgataaagttcatctgctacttcacttacaaatgcttttttgtcacctttaattgcttcaattacgacttcaaaagcttcttcaccgtatttttttgtaatcttttctataccttctgttaataaatattttgtatatgacttttcattattggattgggcactatcttgaactgtctgcgctaatgtttgcactgaaaatggaacttctgtgttgaaacaactttgactgcctgtatgacatgttggtccatttggtatgacatcaattaaaatagtgtcattgtcgcaatctacatgaatatctttaacacgttgcgtatgaccagatgtttcaccttttgtccatagccgttgtttcgaccgcgaatagaaacataccacaccatcttctatcgttttatcaaaagcttcttggttcatataacccaacatcaatacttgttttgtttgattatcttgtaaaattgctggcactaaacctttgctaaaatcaattttatatttggtcatcttactgctatacccccttgccgtatcacttctttaatagattgaaccgtcgtttctcgatcatgtaatatacttgcagctaaacctgcagaaacatccgtctgatcaaataattctacaaagtgttgtgcattgccaccaccaccagaagcaatgattggaatatttacaagagacttaatatttgctaggtgttcaatatcaaagccttgtttcataccatcatgtcccatacttgtaacgaggagctcacctgcacctaactgttctacttgctgtacccagtcatatactttaatatttgtcatttttttaccaccagtcgtacaacaataatgtgcttttctttcaggatcataatagctatcaattgctatgcagatgcattgtctaccgaatttatcactcgcttgtttaatgagctgtggattttttaaagcacttgaatttaatgatactttatctgcaccatgatttagcaattgggtaatatcatcgagactttgaatcccaccccctacagtaagagggataaacaagcgtgacgctgtctgttcaatcacttctagcattaagctatgaccctcttccgtcttagagatgtctaaaaatactaattcatcagcacccgcttcattgtaatacattgctaaatcaacaggattcccaatatcccttaatcctttaaattgaatccctttaacgacacgaccatctttgacatctaaacatggaatgatacgttttttaatcattttagcccctcccaaaaagatgcttgatgtgcagcctttcctataatagcagcgtgaacatttagcgacgctaatcgttgaatatcttgctgatgtctaataccaccggaagcaatgacaggaatcgtcgttgcctttactaattgaccagttaattcaaagttaggtccggacattttgccatctttagcaatatcagtatatataatgccgccaagaggtatatccgataaccgtctcacaaaactaaataaatttaactctgtgtcctcttcccatccgttcactttaatatcttctccataggcatcaacagataaataaatgcgacctggaaatgtatgtgccatctctttaagccaatcagtatcttgaatacctttcgttccaactatgcaataattaatccctgcggcaaagtagtccatgatttgtgacttcgtacgaatgccaccacctacttcaatatctttggttgttaatctcctcaatgacttaatataatcaaactctcgggcatgctgtgccttagcacctatcaagtcgacgatatgaatacgattcacacattcaaattgactatagtaagcaatactttcttcagccgagcgtgacattttttcttcactatcatatttaccctctgttaacctcacacttgttgacccaatcaaatcaatcgctggccataattcaatcatttataaatcccccttgtattgcctgacgcaaaatttgtaacccatatgtaccgcttttttcaggatggaattgaataccaatataattgttaaattgaacaattgccggaatatcagccccatactgcgcatatgcaattacattttctgacatcggcgcttgataagaatgtacgaaataaacatcttgatttaacatagggtgcttactcactaaattattccagcctaagtgtggcactgggtattctgtttggatacgcgaaatatttcctgggataaaccctaatccagatgcatcgccttcatcactatgctcatacattaattgcatgcctaaacaaataccaatcatcttcttatcagtattcttagccaatattgcattgagatttaatcgttttatctctgacatcgcatctttaaaatggccgacaccgggcaatatgattgtttctgcttgatcgattatttttgaggtatttgagacaaccacctcataccctaaatgttcaatagcgcgttttacattactaatattccctaatccataatcaacgatgacaatcattcaatcacacctttcgatgacggcacacgctgatcatcagttgcagttagcgctatgcctaatgcacgggaaaacgctttgaatatagcttcaatttcatggtgtgtattacctccacgaattaaatcaatatgcgttgttaatcttgcattgattacgaccgctctaaaaaattcttctactaactccgtatcaaacgtaccaactttttctttacttaatgatgcattgaatgataggtatgggcgcccacttatatccacaacgacacgtgctaatgtttcatccattggaatgtacatcgttccataacgaacgaaatgctttttatctttaatcatttcaagtaacaattggccaatgacaatgccgatatcttcagttacgtggtgatcatctacgtcaatatcaccttgtgcctcaatgtttaatgacagaccgctatgaaatgtaaacaaggttaacatatgatttaaaaagcccacacctgtattaatatgcgatggtgactgatcatcagatattgaaatatttagttgcgtttcagctgtgtttcgttgtttttgataaatcatattttgcactccattctttaacaatttcttctaattgctttaactgtgatgctgttgcaattgagtatcttacatagcccttcatcaccggctcatcataaaagcgaggtttaaatccttgttcatatacgtattgtcctaattgttgcgctgctgagcctttagtaagtacaaaattagcatttgatgggaacactgacattttatctgcaacatgtgtatcaaatatttgttttaactgctcagctaactgtcgttgcatcgttaaaaattgtcttgtctcttctctatgtctaaaaatataagtcgcaatatttagcgtaaatacatttaatggatatggatgttctattttttgaatatgctttatcgttccagcagtactaattaagacacctaatcttaagccggcaattccaaacgcctttgataatgtacgcattcttaagatgtgtggtgccagttccacgtcatatgccgtaccataatctaaatatgcttcatcaatgacaaagtatccgtttaatgctttcatcttatctgcaatagctgttaaaaatgccgtatcaaattgcttgcctgaagggttatgtggattactcataataaaaaatgatggttgtacttcatcgattttcgttaaaatggtttccaaatcaaacgttaaatctgatcctgcatctacaaatgcaatttcacgatttacttgtgccgcatatgcttgatacataaaaaaatcaggatttagcgttaatgccggaccttctggcatgatcagcattaacttttgaatcaattcatcagatccatttcctgcaataatttgttcaggcgataatccgtaaaacttagcataagcttccttgaattgttcatatgctgcatcaggatataaattatatggcgttgcactaataatagacgtcattgttttttcatccaacggcgtaactggactttcatttttatcaatataaatcatttcaattacactcccctaagactgacgtattaaaatagactgctggtgattgtataatgcttcaacatgagcaatatgttgtgctgaatcagcaatttgttcaaacgtatcttttgataaatggatgaccgtgttccgtgttaagaaatcattgaccgataacccattggtaaatctagctgttctatttgtaggtaatacatgacttggacctgcaacgtaatctcctatgacctctggcgaataatgtccaataaacaatgcacccacatatttcactttttcaatatatggttgaggatttactgtttgaatcgacgcatgttcaggcgcgattgtattcatgacatggcatgcttcatcaaaattactagcatggataaggtagtgttgattagcgatacttttagaaacaatgtcgtatctgtccacattaggcaatgctttagcaatacgtgattctaaatctttaaggacttgcgcatcttcactaatggcatatgtacgtgctaattcatcatgttctgcttgtgcaaaaacatcatatacgatggcatctaaatctgctgtttcatcaataataagtgctatttctgttggtccagctatttggtcaatacctacttgtccaaataaatatttcttggcatatgcaacaaattgattgcctggacctacaatcttatcaactttaggtatcgtttctgtgccataagttaacgcagcaatactttgagcaccaccaacttgaaatacttgatcaacttgcgtaatatagcatgctgctaatacttcttgagacacaccattaggttgaggtggtgtcacaacgacaatattttccacacctgctacttgtgctaacgtcgctgtcattaataccgttgaaggataacttgctttaccaccaggcacataaataccgacactttctagtggatggtatatttcataacactccactgattcttctaactgttgattcgtctgtttaatactttcttgatatgctttaattctttcataactttgttgtaatgcttgttttgttttttcatctaatgtgtcaaatgctgctttaatttgttcatgactaatttctaaatgatctgttttcgtatgatcgaatgttagattatacattttcaaagccttatctccatgaactttaacttcctgacaaatatcgcgaataattggatacaatgactcatctaatggtgcttctaatgaaaattgatttaaaaattgttgtgcattaagcattggcaatagacacctccaaagagcgaataaattgctctattaattgtgattttttaaaataagctgctttattagttattaatcttgcattgatatcactaatatgttgcttttcaaccagtccgttcgcttttagcgtagtacctgtttgaacgatgtcgacaattccgtctaccatatctacaacaccggccaattcaacagagccattcaatttaatcaattcgacatcaataccttttgatttaaaatatgtttcagcagtatgaacataactcgttgcgattttacgataattggtcgtttcaggtttcgctgcaaccgcaaaatgacatgctccaaaaggcatattcaacaaattattaacattatattggcgctcatctaatatgtcgctaccaacaatgcctatgtctgccattccttgttccacatagattggcacgtcacttccttttactaaaatgcattcaatattatctacacttaataataattggcgttctctattttttaatgtttctgataatgtcgtatattcaattacatctaaatagttaattaaactatccattagacgtcctttggctatggcgattcttaacattgtgcatactcccttacttaaagtgttaatcctaatccaaacccttcgatgcttcctttgtaataaccacctgttaaaactcgagattcattttcagcaaaatgacattgaataaataaacctgtgtaataggatctaggtggctgcgcagtaatatctaaatggatgtctttgtaaccttgtttatgtaaccaacgttcccatatttttaattcaacgagtgctggatggtcatttggaatatagtgttccaatacatttaattgttgttgcgtattctctttcaagatttgcacgattggatgttcagtcgacaaatatgtaaccagtcccgataaattacgttcctcaatcattgatagtatgtctggtgtttgtaacgatttatcgagtaaggcatcaagcaattgataatgtcccaatacaacaaaatgcacgttgtctctcaactgctgttgaataaactgaataaagagctttaagctctgttgcacattcgctaatgatggtgcatagttttccaaaccaacttgtacagccgcttcattattccgaatgattaaacctgtgtatgccacttttgttgctgcagttggatacattgagtaataacgcaataattgatctgtaaaatcatttcgaagtgcataaatttgatgctcatgttgccaaaaatttcgctcacccatctgctgcaaatcctcatggttcaattgtttccagtccaacttttcaaccacactaaaatcaactaactcataatccgctttattaaaatattttaaaaatgctgtttccgattcttttaacgcaattaattgttctgaattattcactcgaccaccctttactttcaatactgtatttaaaatcacttggtattttcgttgtttgctttacttctctaccacgctaaagtgtaatatgattaataacttatcatttttagcaatacattacaacctttttcagaaaattcggtgtattgattttaaaattttttaaaataaaaaaggcaagacatttgtgcctataaaaatgcttaaccaagatttttatattgaagttgtacttcttgcacatattgtccttgccttattatgtaaagttattttctttctatctttttattaaatttaactattcttcataatcccgattccctttaaagtaacgtctatcttgtttactatatacattttcaggattaaaaaacggtttgagtttatatttaaattcaaataagtttagaccatcaatcgcaaccctatcttggtaaacgttcgttgctgatatatctgtaaaattgtttggaccgacacctgcaataaacttaaactctgcttcatctaccaaataatcatacgcttgtgtatgtctatcctgtgcgccatgtggaaatacaaacatatctgttttacctacaattggttcaacttcatctttccatcttttagtatcacgtttaataccttctaaagatgttttttcaaaattaatgtgaccatatgaatgactcgcaaatgaccatccatcccgtttcattgcgcgaacaacttcctcagctgcctttttattctttgtataatctttactcgttaattcattcgtgcgataacctaatacgccctcataaccggttaaagcaacaacacctttttcaccatttaaagaaaaatctggatgctcttttacaaatttatttaaaattggcacgatatcattgtcatcagaataagtagcatggccttttttgtctgtagtttcagaaacaacatgtttatttttatcgagtactaaacggtcagcataaccatggtgtctcatgtaactatagtaattcatatcatcaattgagatgattagtggctttttacctttcggcaattttatttttttggcttttacatgatgagatgataagtcgtatacatcatgtggattaacgatgatgtaattatttttatataattcgttcaatgattttttaaattcacttacagtaatcatccaatcattgttgcccttagcttggtgtgtatctcctgtaaacgcaacttttgggtctgtaattaatgggtgataaaacacatgataaacttggccgtgatatgtttcccaatgttcatccattttcgatttatgctttgcatactcatttggattaacagatttattttgagctttctcattttgcttggaacagctatataacaatgcaactgataataacagaaaaaatagcaataaatattttttatgcattaaacattctccctatgttttattatgcacaattataacatttttattatgtggctcataactttttaagaaactgttgggattttaattttattttttagataatgtcatagtattttatttataaaacacaatatctccttgattgataatgtcgtccatagtatcgtctcgcttgaatttaagcctttctgctaaatttattgaacgttggttacacttatttgtcctgataacttttactgtttcttgatcgatataattcacaaaatttgtgattgctgtaatagcctcacatgcgtacccttgtccttcaaaacttggatgtaatttataaaataaatttaatactgtttcttgctttaattgtcgatattcatatccacaaataccaataacactacaatctattttttttaccaatacaaagtaaccaaattgatattgttgccaatggtttcgccatttttcaatccaccgttgtgtgtctaatttggaattatgtaaacctttgggagtgtatatatttgcttgtggatgactacaaatattataaagttcaattaaatgcgaggaacttggaatcattaaatttaatctttcagtatttatcattaaatgtctccctcctatttctatttaaagactatttatatgaatactaatgccacgggttgaaatatcgactattatttaaaaagaataatgtaactactaacatcagaagtattaacgtcaaacacaaaacaacataatcatctttttttaattgttttttgacgtaccaggttctccttttatactgtccgaattgtcttaactccatagcagtactaatagtgtcaattctttcgatactagaaaatattaaaggtaacacaatgcgtttgatacctttaacacggctagtaaattttgcttttttcgaattatcatatcctcttgcttgttgcgcttgtgaaatattaaaatatgtttcttgaatatctggaatataccttaatgctagtgagactgcgtaactgattttataattcacacctagctgatttaaacttgcagcaaaatgactcggattcgttgtgaataaaaatattaacgctaaaggaactgtactaatatattttaatattagattaaaaagatagaataattcctgtgatgttagcgtaaatcgaccaataccattgactaactctgtacgctgattataaatcttcacaccatattcagggtcaaatatgtacacggcaataatatttaatattgtgaaaaacagaatgaatttaacaacaaagcgaacttgtttccattcaatatgagcatatttgaccaataaaatagatgaagcactaattaaaattaaatatcttgtgtcataagtcaccattgcagaaatagaaacaactaataagaataaaagtttaacagtcgcatttaattgatgaatacgactatttcccgggtgaaaacctatagtattatattgattcattggcgtctcaccttcctatcatggttaataaataattgtactaatttctgtggctcgctaatccctatatattcggccatttcaaatagcgatgtttgtctcaatgatgcaatctcacagatttttttatcatttaaaaccaatactggcgtggtatcagcaacgacttgaccttttgataatacaactgttcttgaactatactcagacaataaatgcatatcatgcgtaatcataataatcgtcttcccctgtctgtttagttcaattaaaaatgacattatctcattataatgatagaaatcttgaccagcagtcggttcatccaatatgattatttccggatttaagactaaaacagatgctatagtgaccctctttttttgaccatagcttaaagctgcaattggccaattccgaaatgcataaagtccgcatattttgagcacattctctactcgtatctttatatctgattctttcatacctcgtgctcttaaccctaatgctacttcatcgtaaatcattttttcagaaatcatatgatttggattttgcatcacataacctacgaattcagatcgttcgctaattgacaattgattaaatcccctattacaaaattggatattacctgttatatctaaaaatccacaaattgctttagcaagtgttgatttgccggcaccattgtgaccaactatactaagcatttctcttctataaacatttaattgaacattattaagtacactattactatagtcactatattgaacacatacctcatttaattctaatagcggttcagatttgtacttattatcattatttgcagatgtttcatctatccattttttcactttaaatttaacatgttcactcatacaaacgtcacgtaaattcgctaagttatcaatggattcgacatctacttctgcatatttaagcgctgtacagtataatggttcacgtatgcctgcttctttaagcttagatgattttagcaaatcactaggcgttgtattagcgatgatttttccatctttaaaaagaagaactctatcaaacgtatcatctaatgattcttctaatcgatgttcgacaataatcatcgttgactttgtttcttcatgaatattgtttaacaatctcagcgtttcatgtcctgtcgcaggatctaaattggccagtggctcatccaatattaaaataggcgtacgatggattaatataccacctaatgaaacgcgttgtttttgacctccagataaatcttgcggtcggtgatttaaatgttctatcatgccaactttttcagcccaataacttacatttttcttcatatcatcttgttcaacacaattattttctaataaaaaggccatatcttcagctgctgttaagcctatgaactgtccatctgtatcttttaaaactgtaccaacaacattagatctatcatgtaaacaactaacggttgcatcttgattatttatatatagttccccagttatgttacctttagttttaaatggaattaatccgtttatgcaatttgcaaaagtcgatttaccactacccgaagcaccaactactaatactttttctcctggataaatatcaacatttatattctgtaatgtaggtgttgcttgactatgatattgaaaactaaagtctttgaacgagataattggttcagtcatgatatatcattacctttctatattcatttacatatctgattcaacaaaataactattccttacgtaaactaccttttttaatttgagatgaagcatatgcttttaataatattgtcccaataatgccaactgaaataatatttaatactgcagagataacaccttgtgtataaaccttgttagctggttcgttataaatcaaaatatctaatgttggtgcaataagtgcccagcaaataatattcgcaataatttgaccgatattaaaataaaccatcgatttcctagaaaatcggcctgaagaaagatttaattttagtccaatccagccatataaacagcctataattcccgagcaaataacccaactccaccaggcactaccgtatgtcgtaaaatctttaatagcatgtccaactaatccagtcattaaaccagcaaaaggtccaaatattgcagatattaatgctaaaaatgcatatgatgtttctatattcgtattaggaaaacctgttggtattacaacaaaacgccctaaaattacaaataccgctgctcctataccaattgcaacaacagttttaactgaaatatcttgttttttcatcttcattactccttacataaaaaattcattatattgatggtgctttagataaatgaatcgtccaatcatttccagtaccaatatgatataaatctgaaaatgagtcttgattgactgctacaccaatatttactagcgagttaacatacacaagaggttcacccacattaacatctgcaaacgatcgcgcaaatttaataatattttgatagactttcttatcttgatgataaattgttaccaccaaattattaccatgaacaatttccaaggattttaagaatgccaatggaatatttgtccataatgacccaaatctgatatctaaaatatcaatgcttcctgtaacagaatcctcattttttgtcacttctcttatttctaatgcctcaatactatcaacattaattgcctgaccgagacgttcaaacgctatcttatttgcagctaatctcgcaccattgtatgcataaacatctctaccatgaaaagtatgactttcttccgaatgaggcaatcggcttttcacttcatcaatttcgataacttttttaataccttcgtaatgtttaatatgacttaaagaaccattatcaggtgtaataatgtaatgacctgaatatgttaagcaagcaatgctccgcctatcactacctacacccgggtctaccactgatacaaaaactgtgcctttaggccagtattttacagtttgatataaacgatatgacgctacccaaatgtcatacggtggtatatcatgcgttaagttttcaacacgtatatcatcacttacagtatatgcaactccatacattgcacttacagcgccatcactaagtccaaaatctgattgcaataccaaataatttcccataaaatgcctcctttttttaaaacttcaaaaaaatattatctacatatttaatgttctatattttgaattttcagaattatattaaaatagtacgagtcacttgatgcaaagtcaatagtagtgactataaaaatgataataatagtcagatttatctcattaactaaatttcacggacttgtaatcacttctttatgtttgaattaattgactagggtataacaatagtgtggtgttttataggtcattctttaaatacatcacagaaaatattcgaattcgaaataaaatgcttgcatctttgttttttaggtggtattgtatgtatatcaagtataaaaaatatatctaagagataaaaatatggaggttttatattatgactaactttacttttgatggtgcacacagtagtttagaattccaaattaaacatttaatggtttctaaagtgaaaggttcatttgatcaatttgatgtagctgttgaaggagatattaatgacttcagtactttgaaagctactgcaacaattattccaagctcaattaacactaaaaacgaagcacgtgataaccacttaaaatctggtgatttctttggtactgacgaatttgataaaattacatttgtgacaaaatcagtatctgaaagcaaagttgttggtgatttaacaattaaaggcatcactaacgaagaaacattcgatgttgaattcaacggagtaagtaagaatcctatggatggttctcaagtaacaggtattattgttactggtacaatcaatagagaaaaatatggcattaactttaaccaagcacttgaaactggtggcgtaatgctaggcaaagatgttaaattcgaagcatcagctgaattctcaatctcagaataatctcattacacaatcctcattgttttaatatatatacgaaatgccaactatatcatccctaggtatagttggcatttttcgtttaactcatgtgtaacaagcactaactgttcaccctaattttagacgcctttcattcaggtaggtcttattgaaactgaaaactttgatgaccttttgcaaagccattaactgtataaagcatagatcctccgcccatttctatatcattggaacaaatgatgagttgatttgttccaggtataaattgcggatgagtagaacgtaacatatgcccttcatctcggcctggtatcaatatttgtcctattggataaccccttttattaaaaactaacactcgaccttgaccatacattgctacgtataaattatcgtcactatcaatacaacatgagtctggtccttcatgacctgtaaaatagtacggtatggtagctccaaatggttgtatcgtcacaccatcatcttcaagtgcaatgcgatgtaatcgattggctgttgtttctgttacccatagtactttttcatctgtacttaaagcaataccatttgctacgctaatattttgaatgataggcgtcactgttctaaagtccggcgaaacataataaacgcctcctagtggattggtagagtatcctctaaaatctgtaaaataaaatccacctttagaatcaaataccatgtcatcaatacaatatgctgttgaaagatcttcaataatatcttgtaagttgtcaccattttctgtagctgcaaaaatgcctcctgtagatttaaaatctcctaaataacaaacgaataatcggccatctttatgtattttgattgctgcaggattcgctttgtgacttacaaaaggtcgtttgatttccttcgtttcaggattgattttgaaaatattgccttcgaatacatccaataaaaagagttgtccctgccgatcaaagttcaatccttctagttgcaatccttttttggaaatttcaagccatggttcagctgtaattgtttgtaattcactttcagatataattggaacagcactattggacttcccgctataaaataatgtaggtaaatcttgttgtgacatcatgatcattcctttcatttcattcgttttaactatcaattttattttaaacaagataactatcaaataaaatgataacggtttcatctatctattttatcggtctagtggctgatttcaagctagaaatattgaatgacaatacaactctgttaaaatgatggacgtagacaaatatgcgtattgacgctttattttaaaaattaacatgcttataacatgtttatagaaggagattaacctatgaactatcaagttcttttatattataaatatatgacgattgatgaccctgaacagtttgctcaggatcacttagccttttgtaaagcacaccatttaaaaggtagaattcttgtttctacagaaggtattaacggcacattatctggtacaaaagaagaaaccgaacaatatatggcacatatgcatgccgatgaacgattcaaagatatggtgtttaaaattgatgaagctgaaggacatgcttttaagaaaatgcatgtacgtcctcgaaaagaaatcgttgctttagatttagaagatgacgtcgatccaagacacacaactggccaatatttatcacctgtagaatttagaaaagctcttgaagatgatgacacagtcattattgatgcacgtaatgattatgaatttgatttaggtcatttccgaggtgcaattcgtccaaatatcacacgttttagagatttgcctgactggattaaagagaataaagcgttatttgcagataaaaaagtggttacgtactgtactggtggcattcgatgcgaaaaattttctggatggcttttaaaagaaggtttcgaagatgtagctcaacttcatggcggtattgctacatatggtaaagatcctgaaacaaaaggtgaatattgggacggtaaaatgtacgtatttgatgaccgtatcagtgttgatatcaaccaagttgaaaaaacaattattggtaaggattggtttgatggcaaaccatgtgaacgttatattaattgcgctaacccagaatgtaataaacaaatattagtttctgaagaaaacgaaactaaatatttaggtgcatgctcttatgaatgtgctaaacatgagcgtaatcgttatgttcaagcaaataatattagtgataatgagtggcaacaacgtttaacaaactttgatgatttacatcaacatgcttagttttaattaaatacctttcaaaacacgctttgaaaatccgatttataaaggtttttcaaggctgttttttatgcgcatacataacctgatatgtttttaattatgcgcgtgttatactaaattaaattttaatactgcggggtgtcttaaaatgcacattttagtaacagggtttgcgccttttgacaatcaaaatatcaatccctcatgggaagctgtgactcaactagaagatattattggcacacatacaatcgataaattaaaactaccaacctcttttaagaaagtagataatattataaataaaacgttggcatctaatcattatgatgttgtactagctataggacaagctggtggtagaaatgccattaccccagaacgtgtcgccattaatattgatgatgcacgtattccagataatgatgattttcaacctattgatcaagccattcacttagacggtgcgccagcttatttttcaaatttaccagttaaagcaatgactcaaagtattattaatcaaggacttcctggagcactttcaaatagcgcaggtacatttgtttgtaatcacacactttatcacttaggttatttacaagataagcattaccctcacctacgattcggatttattcatgtgccatacataccagagcaggtcattggtaaacccgatacaccatctatgccattagaaaagatagttgcaggtttgactgcagccattgaagctatttctaatgatgaggatttacacctagccctgggcacaacggaatagttataagtgcacaaacaaaagcaccctaatttgttagtttaagtctaactttagggtgcttttggatgattggtatacagttttactataatgatgtattttagctaaacgacattgtttagtcttctttttttaacttcctaaaatttacaaatgtataaataataaatgctatatttagaatgatgagtatacttactgaaactaaattaaaagtgtctggttctttactaaagatagctgctatccttgctatcaaacttggcaatgaaattaccaacacgatgagcgcataaattttctgtttaattaaaatacaagttccaatgagcgcaattaaaagtactaacccaacgatgaaactctgtttgtcacttaactcaaagaaactatagataggatattttttaataatcaagccacctaaaatcatccataaaaatacgataattccataagtcacatttataacatacgttattttttggtcaccaaatcggactaatgtatttcgtagaatcagcataccaatgacaacacctaaaataacgatactagctatataaagtaaaaatgcaattgtcacatcaaatgtacccaaatctaaaaacctaggaattataatgactgctaaaataaaagcgaagtacaaagtaatatatttatacaaaccggtagtaagacttatctcaggtgataattgatcagccattgacttaatcggtgtattaataattgaacttgtatcttcgttatttttttcagccatagttaaatgatcttcgagctcttccaataactcttctacttctgcttcagtcttacctctaaataacaattcaacacgtaatttttctaaaaaatcttgagattgtttacttaacatcgttttcccctccaaacaagttaatcatccctttattcaaaacttgccatttcgatttaaatacttttagttcctttaaacctgaatcggtaatcgtatagtatttccgcctcgggccgccattactagatttttttattgtcgtatcaacgtatccttttttgtttaaacgcattaaaactggataaatactaccctcacttatctctggaaactcttgattcttaagtttcgtcataatttcatatccatacgtttcgccttgggcaatgagacctaatatcgccccatctaagagacctttcataatctgatctgacactgacattttaatcacctactatcttacataataagatagtacattgagaacttttcgtcaactatcttttattgtaaggtagttgttgtacacattccttaaatgactaacaactttgttaatagggtaatacttacggaagtatattttatttatgggggaggaattaataatgactacaaaaacagtatttgatgtcattgatatggggttaggatatttagtaaatgtgtatgatgcttggaaagttgaaaaggtacttgatgattatcataagcctttttctaataccattcattggcaatttggtcatgtattaacaatttttgaatcggccttagctgttgctggtaaagagaatattgatttaaatatctatagacctttattcggaaatggttcgtctccagatgaatggaaggatgaagtaccgagtattgaaaggattttagaaggtctccaaactttacctgaacgtgcacgaaatctaactgaagatgatttagcaattgaattgaaacagccaattgtcggttgtaataacttagaagagttattagtattaaatgccattcacatcccacttcatgctggtaaaattgaagagatgtctcgtatattaaaaaatttaaaataaatatgtgcttattaaccgttaacaacacgttaacgggttttttatttgtttaaaaggtcacttttttgaatttaataaacaccatctataccagttcttcaccgattctcgaaaaataattatattaatgatttcgttaatttaattttatatttaattattactgtacatcttttgtagttagctttattcttaaattgaaatatgtataaaacatagaaagaaggacgttttaacatggaaaacacggttaaatatcgtaagtttatactccctatcgttgtaggtctccttatttgggcacttacaccttttaaaccggatgctgtggatccaacagcatggtatatgttcgcaatattcgtcgcgacaatcattgcttgtattacacaaccgatgccaattggggccgtctctataattggatttacaatcatggtactcgttggcattgttgacatgaaaacggctgtcgctggttttggtaataatagcatttggttaattgctatggcatttttcatttcgagaggatttgtgaaaacaggtcttggtagacgtatcgcacttcatttcgtcaaattatttggtaaaaaaacattaggattagcatattctatcgtcggtgtagatttaattctagcgcctgctacaccaagtaataccgcgcgtgctggtggaatcatgttcccaattatcaaatcactttctgaatcatttggttcgaaaccgaaagacggatcagcacgcaaaatgggtgcatttcttgttttcacagaattccaaggtaatttaattactgcggctatgtttttaactgcaatggccggtaacccccttgcacaaaatttagcatctagcacatctaatgttcacattacatggatgaattggtttctagctgctttagttcctggacttgtttccttaattgttgtaccttttattatttataaaatttatccaccaactgttaaagaaacaccaaatgctaagagttgggctgaaaatgaattagcgactatgggtaaaatcgctttagctgaaaaatttatgattggtatttttgtcgttgcgttaacactatggattgtcggaagtttcattcatattgatgcaactttaacggcctttattgcgctagcattgttattattgacaggcgtcttaacatggcaagacattttaaacgaaacaggtgcttggaacacattagtatggttctcagtattagtgttaatggccgaccaattaaacaagcttggatttattccttggttaagtaaatccattgctacaagtcttggtggcttaagctggcctatagtcctggtcattttaatattgttctacttctattcacattacttatttgcaagttctacagcacatatcagtgcgatgtatgcagcattactaggcgttgccatcgcagccggtgcaccaccattattcagtgcattaatgttaggtttcttcggtaacctattagcttcaacaacacactatagtagtggtccagcgccgattctattctcttcaggttacgtgactcaaaaacgttggtggacaatgaacttaatattaggtttcgtctactttattatctggattggtttaggatcactttggatgaaagtaattggtatattttaaaatatttaaattagcgctcgaatctcattgatttgggcgctttttaatttgtatttaaaatcaacctttgctaaatcaagactccctttttaaaatacgtttatcctttaaatcattgcgtgcttcactgaaaatttgtataaagatttaagtcattacgtaacatcacataaaatacatttctatactattccgcttcattgattaacattacgtatgccctcataaatcatcatacaaaaaacaccttcgtttaaattcattttaattgcgaattcaacgaaagtgccttatttcatatttaatgtttcaaatttatacgtctgtcactgttactgcacacatacctcagtctcacctcatcatgacacaaaggatattgaaaacacgtataattatctttcctcgtattttatagggtttttgcgaccggatgtttcttcaatttaatgtattgagaaagactatataacacaatacctgtccaaataaatataaacgtaattaattgatctatactaaaaggctctttgaaaacaaatatgccgagtacaaacattattgttggtccaacgtattgaataaatcctattagcgaaagtggaatacgttttgccccggctgagaataggattagtggtattgccgtaatagcaccagaaaataacaaccaaaatgatgacatgttcaatccaaatgacatctgatgttgctgccataaataaataacgtatattagtccagcaggtgcggtaacaatacattcaatcgtaatactgctgatggcatcaatatgtactacttttttcaataatccgtatgtaccaaaggataacgctaatataatagagacgattgggaattctccaatcttgagcgtcatatataatacaccgatgaatgcgaataaaatggctagccattcaaatttattgaatctttcttttaaaaagataagtgcgagcaaaatgctaacaagtggatttatataataacctaaacttgtttgtaggacgtgaccgttcgttacagcccaaataaatgtaccccaatttaatgtaatgacatagcctgctacgacaatcgctaatagctgaatgggcttgcctaacaattgattcatatctcgttgaaatgcattgcgttgtttttgtccaaccgcgagtatgaaaatcatgaatattgctgaaaatataatacgaaaggctaaaatttcaaatgcgcctattgcatcaacgaactgccaatatataggtagtattccccacagaatgtatgcactgagtgctaaaaatatgccttttttatactctgaattcaccttcaaacctccttactttcctaatttttaatttactgcatacgctcacttggttatgctaatataacgattttactaataatatttcgataaagatatcattttgtttatatttcccacatttattcaccaaccactaaacaatattaattttataaataattctgtacaaatcagggtatattgccagaaagactaccatacaacataaaggatggatacaaatgactttacctaaaattggaaagcctgcaacacgcgcgctaaattcacaaggtatatacacattagaagcagtatcacaatatacgaagtcatctctaatggagatgcatggcgttggtcctaaagctatatcaatattggaacaagctttatttcagcaccaactacattttaaaacggaagttcagtcatcattaccttttaagttaacaggagatgtgtcatgcaatcatgcgcctaaacgtcaacaaatgatagattttatagttgttacagcagcattagatattgaattattacgttcactggttacaacagaatttatttggtctgtccctggccgctttgacatatacggacctcaaatattaattcaagaactatctaatcattacaatcaggttgctagtctcaatatccattccagcatcacacatgggtgcttaggttccatgcatggtattgaaatattaaaaactggtaaagagattcattttgctcatttttttgaatttgaaaatcataaaaaggatgccaagttaagcaaagtgacatcttacattgttgttggttaatttatcaaattatatatatcgcaaaaaatcttttgtggttacatgtatatttttatataacaaataatttggcataacatttttgttatatgaacacttattactagagtgcccattgaacatacagtatgattaaatatcatgttatgaaagaaggatatattttgactgtttttaaaaatgagcgcttaagctggttaccatacatagctattgtcattttgttacacgttattgggtttagttttttatggattgctggaaaagaccatcatatcttatttggtatggggattcttgcatatacattaggtttgcgtcatgcatttgatgcagatcacattgctgcaatagataatacggttcgcaaattattacagcaacgcaaagatccatctggtgtgggtttctatttttcaattggacattcatctgtcgtatttttaatggctgtttttttaggggtatctgtaaaatgggctaaagatgaattaccgcatttccaagatattggtggaacgattggtacactagtttcaggtttctttttagtgcttatcggtgtgttgaatctaattattttaatctctttaattaacttgttcgctaaattacgtcgtgaacacattgaagaagctgaagtcgatgcattacttgaatctagaggattggtttctcgatttgtaggaccttatttcaaattaatcacgcgtagttggcacgtattgccacttggctttttatttggacttggttttgatacagctagtgaaattgcgttactcgctctttcttcaggcgcatcacaacaagccatttcatttatcggaatcttatctttaccaattttattcgcatcaggtatgagtttattggatacattagatggtgttgtaatgaagtatgcctataattgggcattcttcaatcctattcgcaaaatctattacaatataacgattactgcgatatcagtcatggcagcattagtgattgggatgattgaattgctacaaattcttgctgataagttagatttacatggtgcgttttgggcattcattggttcgatcgaatttgattatttaggctatattttagttgcattatttttaattacttggcttatttcaagtttaatttggaagtttggtcgcatagaacacaaatggtctagataaggcaacttgtcttgcaactacctttgtattgttgcatttttagacaccctgcacacttcttccattatgctacgctctcagtagtcatctttaaatcgtttcttttagagatgacttcattttgagagcgtatttttctatttaaaatgtatttatccaaaattcaatgctttcgaatttaaaatttcagtatttctgtttaaaatttaattataatctttaatacaggaggcgctatgcttatgaatattgcgaagttagagaattatttacaaattgattcatctcgttataatcgaccgagtattgaagcattaaattattatgcaacacgttttatgttaactgtaccttttgaaaatattgatgttcaaaatagtaagccgatatctataaatatcgatgcactttttaataaaattgttcatgataaacgtggtggtttttgttatgaattaaatacatttttcaaagcctatttacaacaaaaaggatttaatcctgaattaatgtcagctactattcacacacccggtggcggtcgtagtctgaacggttcacatgcttcacttgttgtttctataaatgatgtattctatgtaactgatgttggctttggagacttacctctacatgccattcctattacttcatctgagcatacacaaccaattactgatatcagtggtacattccgcgctatttttaacaacgaagacaaggatattttctatgttcaaaaattcgaaaatgatcattggcatacaaaatatgaagctgaattcaaacctaaacaaatagaagattttaatagcaacatcgaatataatcaaacgcatccagattcaatatttgtacagcatttattaattacaatgccacaatcatttggccgtgctacaatgtctgaaaatcatttaactttaacaaggaatggtagctcagaaaaatttgatgtcactaaagataactataaacattttttagaaaaatattttggactaaatgtaactattaatcgtattgaaaaacaataatagtaaaatataaaaatatgggcgtatcttacttattgtaggtagcgccccttttttatgcttcataaacacaacaaaaaggatatgacacaaacttcatgtcacacccttcttttgaaccgcttcattttacttaagcaagtgcatctacaacataaatgacacctacgaatacaaatgcaatagcaatcatcgtcgaaataaagacgatacccattaatggattaaataataaaatgacaccgaaaacaatacctaataaattaaaaatcactgaaattagttttaagctaccactacccgaaaacgtaaataatccagagatagaactaaaaataaaccaaaaagcaaacatataaataaagaatgctgaacttgcgccaacattaaaaataactaatagaccaaatagaatatctacaatccccataaacagaatccaattttggttaccacctactaaagcttttgcttttctacggtaaacgatttgaatcacaccgttaattaatacaaacagtccaatcaaccaggtaatagcataaaaattttcaattggaaatgtaaaaataacgactgccaacattaataataatacacccattattaaactagaccatttaataccttgatttcctttttccataacaatcaattcctttcaaataaaaccctcttttaatttttacaaaaaatttattatacaataattaaattcccttttctcaatttacacaaacatcatcacttagaaagcaccattgcttttgtctaatatgtacgatgaatctgtatcctcactcaaaaatctactaagtagcgatagctttcaactctgtaaggttcattcattgaattgtaagtttagataaaggctactactccaaacattatttaaaatgaaattaaatacaaaaggagtgagactatgacgatattatcagtgcaacatgtttcaaaaacatacggtaaaaagcacacatttcaagcacttaaagatattaactttgacatacaaaaaggcgaattcgttgcgattatggggccttctggatcaggtaagacaaccttattaaatgtactaagttcaattgaccaaatttctagcggtagcgtgattgctaacggacaagagcttaataaacttaatcaaaaagcacttgccaaattccgcaaagaatcattaggtttcatcttccaagattacagtattctgccgacattaaccgttaaagaaaacattatgttacctttatctgttcaaaaaatgtcgaaggcaacaatggaagaaaattataaagcgatcacgacagcattaggtatttatgacctaggaaataaataccctagcgaattatctggtggtcaacaacaaagaactgcagcagcgagagcatttgttcacaaaccacaaatcatatttgcagatgagccaacaggcgcactcgactcgaaaagtgcaaatgacctattacaacgtttggaagaaatgaataaatcgtttgatacaactattgtcatggttacacatgatccggttgcagcaagttttgcagaacgtgtcatcatgctaaaagatggccaaattcatacacaactttatcaggaaggacgttctaaacaggccttttatgaagacattgtacatcttcaatcagtattaggtggtgtctcaaatgacatttaaccatatcgttttcaaaaacttacgacaaaacttaaaacattatgcaatgtatttattttcattattttttagcatcgtcttatatttcagttttacaaccttacagtttactaaaggtgtaaataatgacgactcgatggccatcattaagaaaggtgctttagtcggatcaatatttttatttatcattattgtcatctttttaatgtatgccaatcatttattcgtaaaacgccgtacacgtgaatttgcgctatttcagttgattggtttaacacgacaaaacattttgaaaatgttagcacttgaacaaatgatcgtatttttaatcacaggtgttgtcggtgtattatgtggcattgcaggtgcacaattattgctttccatagtatctaaattgatgtcgttatcgattaacttatcgatacatttcgaacctatggcccttgttttaactattttcatgctaattattgcgtatgtactgattttatttaaaagtgctttatttctaaaaagacgtagtatcttatcaatgatgaaagattcaattaaaactgatgccacaactgctaaagtaacgactgcagaggttatttcaggcgtattaggtattgctatgattgcactaggctattatatggcgacagaaatgtttggtacgttcaaagcactaactatggctatgacatcaccgtttatcattttatttttaacggttgtaggcgcctatttattcttcagaagttccgtgtcacttatttttaaaacattgaaaaaatcaaaaaatggacgcgtatctattaccgatgttgtattcacatcgtctattatgtacagaatgaagaaaaatgccatgtctttaactatcattgcaattatttctgcagttacagtaactgtattgtgttttgcggcattatctaaatcaaatacagatcaaacccttacatctatggcaccaaatgaatttaacgtggtcgctactcaagatgctaaacaatttgaaactaaactaagccaacaacaaattacattttctaaaaatgcttacgaaactattactgtagataatgttaatgatcaggttattactttggaaaatggtagtgattcaggtcgcacgaattctattttaagtgcaaataacaagttaacaggcaacaatgccatcattacaaatacaaaatcgctgcctaacattattaatatccatttaaacaaagatttagtagtaaaaggtactaagaatgaaactttccgtgttacacaagaagacaaaggtaaggtttatcctttaaatctaagcttcaactcacctgtcatcgaagtaagtcctgaaaagtatcagcagttgaaaacacaaaataacgttcatactttttatggatatgatattaaacaaacatcacaaaaggaaaaagctcaagcaattgcaaaacagtttggagacaaagtcatcacgtatgatgaaatgaaaaaagaggtcgatgctactaacggtattctaatatttgttacatcatttttaggattagcatttttagtagcagctggatgtattatttatattaaacaaatggatgaaactgaggatgaactaagtaacttcagaatattaaaacgcataggctttacgcatacagatatgcttaagggattattattaaaaattactttcaacttcggtttaccattattgattgctatattacatgcagtattcgccgcaatagcatttatgaaattgatgggtaatatttccttcatgccggttattgtagtaattgttgtatacaccctcatttacattacttttgctttaattgcttttgtacattcaaacaaattgattaagaaaaccatttaacacttacgattaaaagatgcttcattagatattttgattttaagcaatgcagtataactattaattgatttaagaaaaggagagattgaatcatgaaatttagagaattagtaaaacaatcatatgaggatttgaaaaatttgactgtaacttggtataacgtcattgctttaacaatacttgttattgtattaagctcattcacaacaccaatgataggcattccagctggtttattaggtggcgcctattatttaaaacgtcgtgaagaaaaaggtaaataaataagccttatgtgctaaactcaatatgtatttcctaccaaagaaaacataaggagtttggacatcttgaaggagatactattgttggtcgtcgtcatggtagtgcaatcattactttggtagaaagagtatccaagatgattatcaccttacgacccttaggtcgtaaggcaactgatatagaaaacgctctacactcaatgttttcatctttaccttctcatatatttaaatcaattacttttgattgtggtaaggagttctcaaactggaaaacattatgtaactgtcacgatatatctatattttttgctgatccaggcacgccatcacagcgaggtttaaatgaacattctaacggaatacttagacgcagtggattagataaagaactagatttcaatttagtaacagacgatcatatcatcagtgttgctcaaaaaatcaatcatcgtcctagaaaatctttaggttatagaacaccattggaagtatttatgagtttcatcgaagatgataaacttgtccagcttaatttgacaatctaaagatttataaaaaagccgttggtctcttcgaaactacggcttttctctgtgctataaaatcagtatggcgaagcacagtgatcattgaattctgactttatataatcaagagtatctttggatacactgatgatatctataacagcattgctaatgtagaatatattttcttgattatagaatacaataaatggctccactaaaccttttttaatatataaagaataatcaattaagtctttgttttttatatttttaatagttgcaataacatacttctcatcggtagaatggatttcttcgtaccagttagtaatattaaaaaaacgaccaattcttgttttttctctaaatttaacaggatataagtattcagacaaaaatgtacatttcgtctttgattggttattaaatataacattaataatattagaaatttgctttttattgagaacatcaatatctaagcgtatcctatttttctcaggtgcttgaaaatagggaatttcatgttctaaatcaaaatgtatttgttgtgtttcaaggttaataatcattttaatctccaattctttttaggttagcatcgtatgtaccacttcttgttttcttgctacctaaattcttaatactgcttgcaccttttcattttatcttctcatatatttaaatcaattacttttgattgtggtaaggagttctcaaactggaaaacaatatgtaactgtcacgatatatctatattttttgctgatccaggcacgccatcacagcgaggtttaaatgaacattctaacggaataattagacgcagtggattagataaagaactagatttcaatttagtaacggatgatcatatcatcagtgttgctcaaaaaatcaatcatcatcctagaaaatctttaggttatagaacaccattggaagtatttatgagtttcatcgaagatgataaacttgtccagcttaatttgacaatctaaagatttataaaaaaggagagattgaatcatgaaatttagagaattagtaaaacaatcatatgaggatttgaaaaatttgactgtaacttggtataacgtcattgctttaacaatacttgttattgtattaagctcattcacaacaccaatgataggcattccagctggtttattaggtggctcttattatttaaaacgtcgtgaagaaaaaggcaagtaagcacattccatcggtatagaacattgctatgacctttcaagtcagattttaatatcaacaagtagcgtttatcgctgcttgttttttatggattgcttataaaatcatcatgtttaaacgatatgtcactttgaaaactagcaaacaccataaaagactacaatttttttatttttataaacccctttaaatcaacgtttctaaggtttttaaaaatcttttttaatttattttcaaaaaacactgtacattatgccaatatgagcgtatagttggtcttacgtaataaaagctcgtgaattaaattgtagtgtatttgtttagaatatcctcttttttagttatgaatttgttacaaatattaagtgcaaaagcacacggaggttttctatatgaataacggtacagtaaaatggtttaacgcagaaaaaggttttggtttcatcgaacaagaaaatggcggagacgtattcgtacatttctcaggtatcgctagcgatggctacaaaactttagaagaaggtcaaaaagttactttcgaaatcactgaaggtcaacgtggagaccaagcagttaacgtacaaactgtttaatcttacaacataaaacgactcattataaatgaatcgctttgattaccaacaaggttctaaatcttgttggtatttttttatgctattttggataatataaataatatgagacgataccacgatgatttataaaaacttatttgccaaatacacactaaggaaaattatgaggctgagtataccaattactgatataatagaaagcgcatttgtcatcgtatttctagctttagtcgtttgtacttcactaggatcttttccattcataaaagcaacaattcgatcgtagttgtccattttatgcactttttttaaatcttctattttcatagatgcataaaaacctattcccaaaatgattgccaccgttacaccccaagtccaattccaataaacaactaaaggtcccattaaaattgcagctaatgtcatgaaaataagcatcacatatgtccataagttaagacttcgttgcgctttaatatcaggtacaaatggaatggtcccttttactaaatcatctaaagttacattgaacaattcacacatcattaataagttatgtatgtctggtaagcttttgtcattttcccaattagaaatactctgcctagatacatataacttttcagcaagatattcttgtgaataaccatctcgttccctatactttttaatttgtttactcagattcaattacatacgcctccagtcaattagtacaatcattacaatcagactatcagataaagttaaatcaagtcacctttatgattgactaaatgttttgacatacgacaacatcggggttcgaagactcccttaagacagacctgtatgattacgcgcttgtaattttctcaatgccaacttgaatttcacttattaatgatgcaacttttccatgctattcaatgcttgcaaagttagtcctagttaagagattacgttcacactatttactattcgattttccagctttccaactatgcttttctaatcttttttgtgctataaattctaccgcttcaaaaatacatactgcactgatgaaccagcttaggaaaccaacaacaatgctaatcaaccacatgtgcgtcatatgtaacatcatccatgtaactaaaatacaaactaatacccctgtcataccaaacactgcgccacgacttacatgcacagcgactttatcaccatattgcatacctgtaataaacatagacactaaaaatactgccggaaacgttgcaaatataccgccaaattctttccaaggtagtgttacagatacaatataacttaataatactgcaaatccccccacaaaaaatttcattaatgttaatttcatgatgttctgcctccaataatttattacttaataactgaatacaactaattatcacgcattttccaaactataaatgtctaatactgaatattgcgagggaaatgacaaaccaacaaacaactgtgaatattgcgcctttccgataacctttatgcttaatgtagagagatgtcaaaaatacagttaatatacaagacagaataccgacaattgctccagtactaagattcatcgacatctccactaattgcgtaccacgatgatctaaagctaatgcgataatagccgcaagaaagactgccggcatagtagctataatacctcctaacttaccacctaccttatcagcaataattgaagctaatgcaacagcgataccaccaatgacaaaatgaagaattgcacttccaattgaaaacatcttcaacgtacctttctataattaattcaatacaaaacgtatcattcacacaaagtgtaaaacttaaattttctactgtaaaggcaactcaagcgatgttcataaagctttcatgatactttcataaactagcaataaagggttcaaatgaaagtatatccagctcaaattagggagtgggacagaaatgatattttcgcaaaatttatttcgtcgtcccaccccagcaaggttgactagaattgaaaaaagcttgttacaagcgcattttcgttcagtcaactactgccaatataacttcgtagagcatagaacattgatttatgtaccagcctgatcaacatataaatataaatttttatgtttcacgtaaaacaaaaaaaaagacaaagctgttatgatcttagctttgtcttttatgtgttagtcatcatgtatacgacatcctactactaacgtttatatattcgaatttttatttcataataatcttcatgatctttgtctttatgctcaacatgtaatcctgtttgttgaatcgcttggatacttttgcctacctcatctcgtgcttgagtgacatcttgtgcaaagcgaaggttttgtgctttgactttttcgggccccgttttttggcgtactctatcttcagtctgtttcacatttagcttttgtgcaatgacttgctcaatcaacgcttcttgttcgctatcagacaatgataataccgctctcgcatgacgttcagtaattttaccttctcttaagcgaagtagtactttcggcgccaacttcaataaacgcaacttatttgcaataaagctttgacttttacctaaactttttgccaattcactttgcgttgtatcaccaatttccaataatttcttataggcttccgcttcttcaacaacagacaaattttctctttgaatattctcaattaatgcaacaacagccgtctcttcatcatccatatcacgaataataacgtctgcttgaggtaaatttagtgattgtattgctctaaatcggcgctctccagcaataatttcaaacatatcttcttcaatcggtcttacaacaataggttgtagtaaaccatgttcatgtattgattcagcaagttctttaattttatttggttcaaacacctgtcttggttgataacggttgggaacgatacgttcaatttgaatggattcaacattactattgcgatcttcttcaatatgtccaatgatgtcatctttgtttttcaaaccaaataattttgaaaaaggttttttcattatccattcgctccttttatgttagttgtaaaggattatgcattatttttcaagtaaaggagtcttattaggcgtccctggttttcttggatactttttcggcgtctgtctttttttatcaataatgaacatctggcgctctccagcatcttctggcaattcaaaggtatgtgtttctgtaacattaccacctaacacactaattgcaaattttgcttcttctaattcttcttcaccttttgaagattttaatgcaacaaactgtccaccttttttaactagcggtaaacacaattcacttaacacggataatctagctactgctcttgcagtaacaacatcataagactccctgtagacacccttaccaaatgtttctgctctatcgtgtataaagctgacatcctgtaattgtaattctgacgctaaatggtttaaaaattgaatacgcttatttaatgaatcaacaatcgtcacttttaactgcggaaacattatttttaacggaatacttggaaaaccagctccagcgcctacatcacatatacttataggctgattaaaatcaaaataaaaactaggtgcaatggaatcataaaaatgtttcaaatatacatcgtgttcatctgtaatacttgtcaaattcatcttttcattccattcaacaagtaaacgataatatgtttgaaactgttgtttttgagtctcagttaattgaatattatgttcttttaattgttctgctaaccattctacagtcattagtcactcaccctttggagtttaccttgttctaagtaaatcaataatatagatatgtctgctggatttacccctgatattctagaagcttgtgcaatatttaaaggttttacttctgataatttttctcgcgcttcagtcgccaaactatcaatcttactataatctaagtcttctggaattttcttctcttccatacgcttaactttctcaacttgttgtagtgatttattgatataaccttcatattttgtttgtatttctacttgttcttcaacatctgcattcaattgatgttcttcttctaaaagttctaaaattatatcgtaagtcatttcaggtctgcgtaataaatcgatagctaaaataccatcttttaagcgagaaccaccatgttgttcaataatcgcttgcgtatgttcgtttggtttaatacgaatatctgataaacgcttaatttccgcatcaatttgctgacgtttttcattaaaacgtgcatatctttcttcagaaatcataccaagttcatatcccatatccgtcaatctcaaatcagcattatcatgacgtagtaacaaacgatattctgcacgtgatgttagtaaacgataaggttcattagtacctttagttacaagatcatcgattaagacaccaatatatgcatctgaacgacttaatatcttttcgcctgtgtttaacactttacctgcagcgttaatacctgccatcaatccttgtcctgctgcttcttcataaccagatgtaccattaatttgacctgcagtatataagtttttaatcattttcgtttcaagtgtaggccataactgcgttggcacaatcgcatcatattcaattgcgtagccggcacgcatcatatctgctttttcaagacctggtatcgtctctaacatttgacgttgcacatgttcaggaagacttgtagacaatccttgcacatatacttcatttgtattacgaccttcaggctctaagaaaagttgatgtcgcggcttatcattaaatcgaacaaatttatcttcaattgaagggcaataacgtggcccggttcctttaatcatccctgaatacattgcagatagatgtaaattatcatcgataactttgtgtgtttcagcattagtatacgttagccaacatggcaattgatctaatatatattctgttgtttcaaagctgaatgcacgacctacatcgtcacctggttgtatttcagtcttcgaatagtcaattgtttttgaatttacacgcggtggtgtacctgttttaaaacgaacaatatcaaaaccaagttctcttaaattgtctgataatgtgattgatggtaattggtgatttggtccacttgaatacttcatattacctaaaatgatttcaccacgtaaaaatgttcccgttgtaataattactgctttagataaatactctgtaccaatatttgtacgtacacctttaacttcattatcttctataataagttcgtctaccataccttgcattatatgcaaattttcttcatcttcaatcacgcgtttcatttcttgttgataaagtactttatctgcttgcgctcttagtgctcttacagcaggtcctttacctgtatttaacattctcatttgaatgtgtgttttatcgattgtttttgccatttgtccacctaaagcatcaatttcacgaacaacgatacctttagctggtccacctacagatgggttacatggcataaatgcaatattatctaaatttattgttagcattaatgttttagcaccacgtcttgcagatgctaaacctgcttctacacctgcatgtcccgcacctataacgattacatcatattcttgaaccacaatataaacctccttatttgatatcttactagccttcttaagacggtattccgtctatttcaattactatttacctaagcagaattgactgaataactgatcgatgagttcatcacttgcagtctcaccaataatttctcctaatatttcccaagttctagttaaatcaatttgtaccatatccataggcacaccagattctgctgcatcaatcgcatcttgtatcgtttgtcttgcttgttttaataatgaaatatgtcttgaattagaaacataagtcatatcttgattttgtacttctccaccaaagaacaaatctcgaatttgtatttctaattcatcaataccttcttgttttaacattgaagtttgaattaatggcgtatcacctatcatatctttaacttcattaatatctatgttttgctctaaatccattttattaacaattacgattacatcttcatttttaaccacttcatataatgtgtaatcttcttgagtcaatgcttcgttattgtttaatacaaataaaattaagtctgcttggctaagagcctttctagagcgttcaacaccaatcttctctactatatcttctgtctcacgtataccagcagtatcaactaatcttaatggcacgccacgaacattgacgtactcttctaagacatctctagtagtacctgctacctcagttacaatcgctttattatcttgtattaaattatttaacatcgatgatttacctacgtttggtttaccaacaataactgtagataaaccttcacgcataattttaccctgcgcaccggtatctaataaacgattaatttcctgtttgatttctttagactgctctaaaagaaattcagtagtcgcatcttcaacatcatcgtattcaggataatcaatattcacttccacttgagcgagtatctctaatatagattgacgttgttttttgattaagtcacttagacgaccttcaatttgattcatcgcaactttagaagctctatctgtcttcgagcgaataaagtccataactgcttcagcttgagataaatcaatacgaccatttaaaaaggcacgttttgtaaattcacctggctcagccattctagcgccatatgtcatagtaagttccagcactctattaatcgttaaaataccaccatgacaattaatttctataatatcttcgcgtgtaaatgtttttggcgctcttaacacagacaccataacttcttcaatcacttctttagactctggatcaataatatgaccgtaattaatcgtatgtgatggaacatcatttaaaagatgttttcctttatataatttgtcagcaatttcaacggcttgcggtccagacaatcgaacaattccaattgccccttcacccattggtgttgaaatactcgtaattgtatctaaatccatattgctactcgcctccttcaacgatgtgaatacattttaaagtaagttattataaccctaaggtcagtcttacgtttgtctgaggtaagacttcgggatgtgttgagtggttaatgttttccttcccctaccctatccttacttaatctttttattaaaaactttggcaattttaagtacgtgctcaagactattctgtatttgtaaagtcgtcatatctttagctggctgtcttgctattacaataatatctttggccaatatatgcgacttatgtactttgaaattttcacgtattgctcttttaatcttgtttcttaacactgcattacctagttttttagaaacactaatacctaagcgaaaatggtctatttctttattattacaagtgtatacaacaaattgtctgttggctacagaatgaccttttttatatattctctgaaaatctgcattctttttaattcggtaagctttttccaataacatcactcgcttatttatcgtttttatttgaagctatatttaaacttctattgagcttataacataaatttctatttattcttaatttaaacgaaaaaaaagatcactgatgagtcagtgatcttatgcagataaaactttacggcctttacgacgacggcgcgctaaaactttacggccattttttgtgctcatgcgttttctgaaaccatgaactttactatgtttacgtttatttggttgataagtacgttttaccatgcaaaacacctccatctttatacagttatctaatataccagattatgcagactctgatcactttaatagataagattttgcgtttcttagattaaaattctcgtattagctcattgattatctagtcataattcaagcaactactacaatataacaaaatcctatttataacgcaagttcattttat
